United States Patent Application Publication US 2024/0301345 A1 - sequence listing, part 17

SEQ ID NO: 2940 - DNA, 11248 bp, Unknown
  R19_24m  MAG No. k141_4667
aggagggcatcatggccgagatcacatggaagtcgattctcaccaagctggtcgggggagaccaccttactgctgaggaatcggagtggttcgtggacgacctgatgcaaggtaacgccaatccggccgccgtgggtgccgcgctcgctatgcagcagcagctgggactgaccgccgacgaggtgcgtggtgccgccaaggccatggtctcccacgccgtgccgctgaacgtttccggtgggaccaccgacatcgtgggcaccggtggtgacggcttcgccaccgtgaacctgtccaccatgggctccgtggccgccgctgcagccggcgtgaagatcgtcaagcacggcaaccgcgctgcatcctcgaagtgcggtgccgccgatgtgctcgaagacctcggcctgccgctggatttgaagccggaggccgtcggcgaagtgggcgacgaggtgggcatcaccttcgcgttcgcccgcaccttccacccggccatgcgcttcgtgggcccgattcgtgccgcgctcggcattccgtgcgtcttcaacatcctgggaccgttgaccaaccccgccaacccggcacacgtggccatcggctgcgccaaccgcaaggtgagcccgatcatggctgccgtctacgccagccgtggtcagtccggcttggtctacacttcgcatgagggcatggatgagctcgcccccaccggcccggtttccgtctgggagattcgcgacggcaaggtcaccgaaaccgagttcgacccgaccgtggatctgggtctcgccaagattaccgtcgaccagctcaagggcggcgtgccggacgtcaacgccaacgcatttaaggacttcctggccggcaaggacattacgtcccgcaccaccgcgctgctcaacgctgcctccgccatcgtggctgacggcaatctggtcggcaacggcacactggccgagcgcttcgccgaggcctacaagctggccgaggatgctgtcgactccggcaaggctgaagccctgttcaacaagtggatcgaaaccgccaagtccaaggcgtgatatggaatgggtttgctcgaatatgtttacctttccttcattatcaactatttcgagttgcaggagtccatcgacttcaattcgtgacctatcttggctcggccgcaattacggacgagctacgcctgtgatacattggttcgctatcgctcacacctcgcctacaaacagcccactgggctgtttgcttaacggctcggcctcagagaggggagccaaggactacacaacctacgcgaactacaccctcgcgccgtcgtcgtaatagccaccctgatcaccggggcggtctttgcggttgaggattttggccaccaatccgcccagacccaaaatgacgcccagcccgaagagaatattgagcagcgcgcctaagagaggaatcgcgttcaagccgggaacgaatatcatcaccgtttcgcctgcgagaccgatgatgagcaacgccgtcagcagtaccgtagatgctttgaccggaccaagatcagggttcgggggagtgaagccgccatcatcataggcgtccatcacattatcggtatccagccagctggagccggtgaaatcacgggggcctgactgcttgccttttttgccgccacggctcgggcgagcatcatcggtgaacgagccgatatccaagtcatctacggaaagcagtgcttccttctcgcgtttcttggcctgcttctcgaactttttggcctgcctggaggaagccacgtcatgcaagtcggcctgatgctcggcttcgaacgcggcccacgccgcatccaaatcgttcatgtcatgcgattgcggtgtatcggcaccattcgtggccggtccggcggcaccgggagtcgacgacttggacgaagtatcggaatcctgtccgttgcccggcgtgggggttggccgctctccgtcggcattgctattctggttctcagtcataactgtcactctaatcaggcgaccggccaatggctagttcgtctgcgggaggaatgccaagtgctctactggttcttcgtcaaaggtctcggccctattgctcatcatcgtttgagccctgctgtcagcggactgaataacgtgcctcgagagggtggcgcgattatcgcagccaaccatctggcggtgattgacgatgctttgattccgattacctgcccgcgcatggtgcacttcatgggcaaagccgaatacttcgagggcaagggattgaagggcaagttcaagaagtggtggttcacgtccgtgggcgtgttcccggttgatcgttccggtggcagcaagtcgcttggcgcactcgagcatgcacgcgagattatcgaggatgggcacctgttcggtatccacattgaaggcacgcgcagcccagacggtcgactgtacaagggacacaccggtgccgcacgacttgcgctcgagaccggttgcccgattgttccgaccgccatcatcggctcggacaagctgcagccgattggcacgtcgattcccaagaagggcaagaccaaggtgttgtatggcaagccgattgaggttgcgaagaagccggctgatgaaattacacatgatgatttgcgttcgctgaccgatcgtgtttccaccgcaatccagaaaatgagcggtcaggaattcgtgaacgaatacgcccagaaggtcaaggccgagctcaaggcccggcaggccgctgaagaagccgaaaagtaattaacaaatgaggctccctcgtctgaagacagagggagcctcattcaaatctcacacgatggtgagggtgatgacggtggggttgccgttggcatcgcgcaagcgaatcttgccgccgttggataggtccgtatcgccacttttcacggtacgtaccgtgccgaacaggccaccgagcaccttgtcggttttcacctcgaacccgagaccttcaagtgtcttggttacggcgctttcctgtttgccgacaaggccggacggtatcgtcgccatctccggacccttggaaatcaccacgtccacgctatcgccccacttcagctgggctccggcttcctgagacgcggaaatgacttgaccggcctcgaccttgtcatcgtactgttcggtgacattggccgtgagcttcaactcgccgagcgcggcttgcatctcatcctgggtcttaccgacgatgttaggcatggtcaccggcatcggtcccttgctcaaagtaaccgtcacctcatcgttgtgcttggccgtggtaccgggatcaggggagatcgtcaatgccacaccctgcggcgtgtccatcgaatactcatccttcgactcgtcatgcttgacattatcgaagccggccttcttgagcgcgttcaacgggtccttgccattggccgaattcgcgtcgagaatatccttcgggatggtggtcatccgcacgcccttggacaccaccaccgtaagctcctgattggctcgcttgcttatgcggctgttcacaacggccttggtcttgttcacggaagaagagatgatcttgccttccgccacgtcgtcgctgtattccttgtgcgtcttgtaggggatgccgagagccttcaacgtgctctcatacgtggcccaatccgcgccggccaacgagcattcggtgcttgcattcgcatcgcaggtcacgtcatccggcttgggcacactccaatagctgcccggtccggcaaaccaccaccagccggcggttccgccgattgcagccagtaccagcacgatcaccagtacgatgatgagcggttttttgctgcgctgcttctttggcccggtgccgttggaagcgacgtccggctcatcggaaagggcaagcgctcgggtgaaggcatcgccggcctgaggcagcacttgtgtctcgctgccggactgtgccatgatttgcgtcttatggggagctgaagcatcggctggcgtcgacgaatcaagtgccgtggtgggggcgaccggaggagccggaggattgacgtctgcggcgccaccggtatcgacggtattgcttgcgacatcatcggccaaaaacgctggtacggacggcttgaacgttgctgcaccggcaggtacgccggtcagcggggcctgctcggcgatattgcctaccagcgctgcagcggtggcatcggtatgatcacctccgatgggttcggcatgcaaacggtattgccacgcctccagcggcaatttggcggccaactggctcaattcctcagctgctgccgcgccatcggcggggcgagcatccacctgacgcgcggtcagatgggcgatgaacgccgccacggacggatcaatgccctgacagaccgtggccacggacggcacgtcctcatgaacatgcttgaagacaagcgtcaccggattatccgaatcgaacggcaccttgccggtcagcatctcccatgccatgatgcccacggaatacaggtcgccttgcgcggtggcctgattgttctcgatcatttcgggagccagataagcggcggtgcccaatagcatgccggtggagctcaatgtggcctggctggcggccttggccagaccgaaatcagtgatctgcacatggccgcgatcattgatcaaaatgttctcgggcttgatgtcacggtgaaccacgccggcgcgatgtgcggaagccagaccatccagcgtctccgcgaccacgcgcagcgtctcacgtacggagaatgtgccttgggcgttcatctcatgccgcagattgacgccatgcacatattccatgaccagaaaatcaagtccattgaactcgccggtgtcatacacctgaacgatgtgcgggttggcgatggacgcggccgaattggcctcgcggcggaaccgttcgacgaactgctcccgatgcgggcctttggcgagttgtgtgtgcatgaccttaatcgccacggtgcgccccagacgctcatcgatggcctcatacacggtggccataccaccctcggcgatattgcgcacgatgcggtagcgtccctcaatcatctgcgcgggctcgttctcactcatgttgtatcgtacggttcctttaatcacgactaaacatgttcagtgtacatggccccggttacgcggccggagcatcggcgcatagttgtcacgggttttcaccggtgttcatggtctcatgacccggcggctcgcattgtggactatcgcaaggattcggggacgaatcgcgcacaagcctcggtcagacggcgctgcgcttcggaattcagctcaagaccggcaatcgccttacgggactcaccccatagggcagcgatgcgctcgcgggatcgatcaagagcaccggtcgacgtgaacagttcaatggtgcgggctacctggtcgtcgttgcgacaatccgcttcgaagatggcaatcagatcggccttatcctccgtatctgccgcagacagagcatcagccaacagcactgtgcgtttgccttctcgaatgtctccgccaacgggtttcccggtattgcggcttgatccgacgacatccaacaggtcatcggccagttggaacgccagtccgagcggccggcctacggccaacgcgcaatgcctggcctgatccgggctctctcctgcggccagcagtgcaagcagcagtggggcgatggtggtgtaactggctgtcttccagcggaatacgttcaatgaggcgttcgccagagcttcgggattggacagtggggtcatctcgacggccaagtccagtatctggccgatctccacctcgcgctgcatggtaagaaacgcctcgttcaaggcatcggtgttgggaagacggctggcggaccggtgtgtgatttcaatgcaggcggtggccagaatatcgccaagcatcaggcccaagccacggcctatggcaccgctgtgtacggcctgttccaaggcacggtgtgcggaaggcttgccccggcgcagatcggattcgtcgatgatgtcgtcatgcaccagtgcggccgtctgaaacacttcaatggcacaggctaggtcgatcatggcgtcacgccgatcaggagtcacgtcgccggcaagaatatcgaaggcgtccaatgcgagcaacgcacgcagtcgtttgcctccttggctggaggaggcggcttggcccacaacctgttccatcaccggtttcagggcgtcggcaacctcgtcggtggcgggggcggcagtcagttcccgcaccaactgaatgatgcgtggctcgatgatttcgcggttgttagcagttgtgcacatgcctaataacttatccacagggtctgaagaacacaagaacgttgggaatcaagggttttgaagctagaaccacaatggtcgttttttcctgcgtcatacggcgttttcagccatagtgggcacacaccccctcggcgcatgagctatccggctcggcgcgcaccacaacaccaatagattgcacaccattagtcaaggaggacatgatgaacaacaacacgccgcacaagccgcgtaagagccgacacgccaaacggcacgccgccgagcagacggagccctttggctttgatgagttggagacgagatcacaggaatttcgcaatgatcgccgacttcgaggcgcgcaacaggctaatgccgactgggtggccgaaccattggatgaatggctgtcttgtctcgatgccgggaacaccgacctaggccgagagacgatggccgcgtttgcggtgggcatgcgcgagaccttatcgattcgtgatgcgctgattctctcgttggttattgatgaaagccgttgccccaagtcatggctcatggaattcgcggcgcgaccgcatctggcacgtacgagaacacgaatgggcgagctgctgacctgcgcattcgaggatgaaggcatgatgccggataaggagcgttgccatgccggcatcggtatgttgctcgatatcgcggaagcctcaccggtgccgtactgcatacaaccattggccgtaatcgcctacaccttatggtggctgggcgatccgcgagcaatggtgttcgccttgcgatgcctgctgctcgatgaggattgttcgctggcggcgatgatattctcagccgccgatcgaggcgtggcaccggcatggtgctcgggctgaatgaacagaaacggcggatttccgaggttttatgcgcgatgcgcggaaggaaagcgtgtggtgattggcaacacgtcgggcaacgatgtgggaataatcgtccgtggagggtggtttactcacatagttgacgatttgcccttgccagaagtgggcccgtgtggtatatgcacttcacggcgagagatcagaaggagcagttttggccacgaaggaaacgacggcaaccaagcagacagccgagtccagcgaggagaccgagaccaagaagaaggccagctctacgaccaccgcgcgcaagacttctgccaagaagtccaagtccgcagagccctcgaaaaagaccacgcgcaagtccgccgcgaagaaaaccgcgaagaaggccaaggacgatgagctcgtcaaagacgaggacactcaggtcgatgacgagcttgatgacgatgccgaggtcaacgacgacgatttggacgttgacgacctcggcgaggatcttgacgacgttgacgaaggcgatgccgacgacgaagacctcgatgaggacgatgccgacgacgacgatgtggaagacgacgaggacgaggaagaagccaagtccaaggcacccgagcagcccaaggaaaagggtgcctacgtggtctccgacacggatgatgaggaagagaacatcatcccttcgggcaatccgaagcgtcgtgtaatcgcggccggcgcaaccgccgacccggtcaaggactacctgaagcagatcggccgtgtgagcctgctgaacgccgaacaggaagttgacctgtccgagcgcatcgaggccggcctgtacgcccagcacctgctcgacaccgaaagtgaaggcatggagttcaagcgcaagcgtgaactcaagtgggccgccgccgacggcaagaaggctaaggaccatctgctggaagccaacctgcgacttgtggtctcgctcgccaagcgttacacgggtcgtggcatgctcttccttgatttgatccaggaaggcaaccttggtctgattcgtgccgtcgagaagttcgattggaagaagggcttcaagttctccacctacgccacgtggtggattcgtcaggccatcacccgtgccatggctgatcaggcccgcaccattcgcgtgcctgtgcacatggttgaagtgatcaacaagctgtcccgtgtacagcgccagatgctgcaggatctggggcgtgaacctacgccggacgagctggcccgcgagctggacatgccggttgagaaggtgcaggaagtgcagaagtacggccgcgaaccgatttccctgcacaccccgcttggcgaggatggcgattctgagttcggcgaccttattgaggataccgacgccatcgctccgtccgacgccgtggccttttccctgctgcaggaacagttcaagcaggtgctggaaaccctgtctccgcgtgaggccggcgtcatcaagatgcgctatggccttgaagacggccagccgaagacgctggacgacatcggccgtgtgtatggcgtgacccgtgaacgcatccgtcagatcgagtccaagaccatgtccaagctgcgccacccgtcccgttcgcagaccctgcgcgacttcctggatcaatgacggtcggcccgcttagtaggccgaccgcgcgaggagtttgacagcccagtgggctgtcagacgacggagccatccgttgaaggctcccctgaagaggggagccaaattattagaaaataggactgtatgcccaaagaagaatacggcgccaaggacctagctgttcttgagggcttggatgcggtgcgcaagcgtccgggcatgtacatcggcaccaccgactcgcagggtcttatgcactgcctgtgggagatcatcgataactccgtggatgaggccttggccggcttctgcaacgatatcgtggtcaccctgcacaccgacggttccgtggaagtcgcggacaatggccgaggcattccggtggataaggaaccgaaaaccggcctgtccggcgtggaggtcgtactgaccaaactgcatgccggtgccaagttcggcaactcgtcttataacgccgtcggtggcctgcacggcgtgggctcctccgtggtcaatgccctgagctcccgactggacgtcgaagtggatcgtgacggcaagacgcaccacatgaccttccaccaaggtcaccctggcgtatacacggatgccgacccggccaatccgtctcccgattccccgttcaagcgcactcgcaagaaccgacccaccgagctggaaatcatcggcaaggtatctcccaaaaccactggtacccgtattcgctactggtatgatccggagattttcaacaaaaccgccgaattctcatacgaacagctcatcgaccgcgtgcgccagaccagcttcctggtgcccggactcaaaatcaccattgttgacgaaaacgtaccggaaacggcgactgacaccgccgaagccattgatgccgacgcagtcgaacctgcgcaagaccaggccccggctttggacgtctcgttcaacgatgccgaactcttcgacgactccaccgaggctcaagccgacagtaccgagagcctgtccgaggaggacttctcgctgacggccggcgaccaggtcgtcgatggcgcgttcggcgagcagcccgcgcacccgcgcgtcgtggaattcctgcacaccggcggcgtcaaggacttcgtcgacttcctatccaaaggcgagccgatctccgacatctggcgcatccaaggcgagggcacctataaggaggagacccagaccgtgggcgaaggcggtgaactgcacgcccaggaaatcgaacgcacctgcggcgtggacatcgccctgcgatgggtcaacggctacgacaccacaatcatgagcttcgtgaacatcgtggagacgcccggcggcggtactcacgtggacggtttcatgaacgccatcaccaagcagattcgcaaggcggtggaagacaacgcccgcaagctcaaggtgaacatgaaggactccgccatgaaggtggagcgcgacgacatccaagccggactcgtggccgtggtcaccgcacgcgtggccgaacctcagttccaaggccagaccaaggacgtgcttggcaccgcgcaggtcaagccgatcgtcacccggctcaccgacaagcaattcggcgagatgatcaccggctccaaacgcggatacaaggaacaatccggccgcgtgctggagaagatcgtcggcgaaatgcacgcacgcatccagtcgcgcaaggccaaggaggtcacgcgccgcaagaacgcgctcgaatccgcctcgatgccggccaaactctccgactgccagccgggcaatgacgacgtggccgaactgttcatcgtcgagggtgattccgcactcggtaccgccaaggccgcccgcaacgccggtttccaagcgctgctgccgattcgaggcaagattctgaacgtgcagaaggcgtcgattacgcagatgctctccaacaaggaatgcgcagccatcatccaggtggtgggcgccggctccggccagagctttgacatcgaacagtcgcgctaccacaagatcatcatgatgaccgatgccgatgtggacggcgcgcacatccgtatcctgttgctgacgctgttctaccggtacatgcggccgcttatcgaacacggctacgtgtatgccgcagtaccgccgctgcaccgcatcgcgttgaccggctcgcacaagggcgaatacatctacacgtattccgatgacgagctggccggcaaactggccgacctcgacaagaagcacatcggttacaacgacgacatccagcgatacaagggtctgggcgagatggacgccgaccagctggcggacaccaccatggacccgcgcacgcgcatgctgcgccgcatccgcatggaggacgccgcccaggcatccgagatcttcagcctgctgatgggcgacgacgtgccgccgcgcaagcagttcatcgtcgacaacgccgacgatttcgaccgctccaagatcgatacctga

SEQ ID NO: 2941 - DNA, 7488 bp, Unknown
  R19_24m  MAG No. k141_4703
ccggcgtaaagcctgagcgcattatcatcgacccgggcctgggtttctccaagcccggcatcgagcacaacctgccgctgctgaccggactcgagaccttccgcgccacgggatatccggggctgatcggccagtcccgcaaacgcttcatctcggcgatgcttaccgaggcgggcgctgccggtgctgatgggccgatcatggcccagcgcgatgacgtgaccgcagccttgtccgccctgtccgccgaacatggcgcatgggccgtgcgcgtacacgacgtggccaaaagccgcgccgccgtcatcgccggcaacacctggcgcgaatacgcatgattcccctggctccctgttttggttgcttctaggccttggctcccctcgggcgaggggagctggcgccgaaggcgactgaggagagcatttgagcagaaagccttaccaatggacaccatcacacttaccggcgtacatgccaacggcacccacggtgtgctcgcctttgaacacgaacggccacaaaccttcgtcgtggacgtcaccctgcaccttgatctggccgcagccggtcaatccgacgatctcaacgacaccatcgattacggccgtgtggccaaggacatcacggctgtcatcgaaggccctcatgtggacctgattgagcgtctggcccaacgtatcgcggacgagattcttgccgatgcgccggccgtcgcctccatcgacgtcaccgtgcacaagcctcacgcacccatcgtcgtggcttttgcagatgtatcggtctccatctcgcgcgtgcgtgccaccgataatggacgtactgctgaagagcatgccatccataacgcggtggtggccttgggcggcaatgtgggcgaggtggaatccaccttgcgagccgccgttcgggagattgacgcgctgctcggcacacaggtgaccggtatttcgccgctttaccgcacggccgcgtggggcatggctgacggtacgccggatttcctgaacgccgtggtggagcttgaaaccacaatgggcagccacgaattgctcgccgcgttgcaaagcatcgaggcgaaccatgggcgaattcgtgagaatcattgggattccaggccgttggacttggacattatcgactttgatggcatcaccagcgcggatccggatctggcattgccccatccgcgtgcttggcagcgcgcgtttgtgctggctccttggttggcgctgaatccgaacgccaaacttgccggagcccatgaggggcctgtagccgatttgctggccgccgcaccggaccgtaacgccgtgcagctcgagagcgaagactggatgctcggcgggcatgcagtcaagcaaaaatcagcgtcggagtcggcacccgtctcacgcaaggcgattatttcgctggattccacctcgcaggatgtcgaacggctgttccgcgaaaccatcgtttccatcgacagtgttcctggcaatcaggtacagggcatctcgccgctctaccatgtcagccatttcgacggcccggacgcgatgagcgcggtcatccaaatcgaaaccaagttgccgcccgccgacctgattgccgtattgggcagcatcgaaagtgttcatgatctggcagtcgaccttgaccttgtcgacatggaaggcgtgacttccgacgagcccaactgcagcattccttggccgtcggcccgtaaccatgcgtcggtattggcaccttggctggatatggacccgaatgcttctctgggcggcgacccggtggccttccttttggccatggcaccggatgccggacaggtcggattgctatcggacaactggatactgtcgaacagttgagctgatggcagaaccagttacgaacggtaggctagaaaccagacggtgacggaccagtctccggcctcgaacagccgggcacggcagtgacgaaaaccaaatcaagatgaacggcccaggcgcgagggccgttcgcaaacagcaaacagcaacgcaacgataaggaggccggacatgaaaacacggcgaacaccatggtggcagtatgtgatcggtgccgtgctgggcctgttggcgggtatcggtctggcctcctacggcgaaagctcgggactgtcgctgattggtgcgccttggattgtgaccggattgctggccgtgctgggcgttatcgtgctgatcttggccctgcaagtgcataaatacgcgaataccgaccccaagaagcgtccgcatagcttcatcaatcccactatcgcggtgtatacgctggtgctggcaaaggcactgggattggcgggcgcaacgctcgccggctggtatggcggtcagattgtgatgagcctgagccatatcgaggcggatttctatgcacacgccgtcaccgagtgcgcaatcgtggccgtggtgtgcatcgccgacatgatcatcggcattatcggcgaatggttgtgccagttaccgccgaatgaaggccccgaaaacccgaaaatcaaggaagccaagcgccgtagcgacatagcccaggcctacagaagataatccgtgataagcccctctgacgagggggccgtaggcgtagccgactgggggagagaagaagaaaaaccacaccatcggccaagcccgattcccactattcctgcggcacgcgaaccatagcttcctgagcgatggccgccaccaagtcgccattctgcgcatacactttggcgatgccgagtccgcgtccgtgcgcggcgataggcgtatcctgcacatataaatgccattcgttgatatcgatatcctgataccaccacatcgaatggtcgatggacgcataggaaatgcccggtgtggaaatcgacagtccggcgcggcgcagcaccggctccatcatcacctgatcgcagccgagtgccagcatcgcacgatgcatgacctgcggcacatcgacgtggccatcggccttcatccacaccatctgcttgccggaatcatgctcggcggaatccttgtctgcgcgcagcatcacggtcggcgtcacgtggcggatatcgaatggcgatttctcgacatagaaattggcgaacggcgacttttcggcgaacggctgcatgagttccttggcggaagtcaacgtttcgggatcgggcaggttttccggcatcggatcggcaaattccacaccctcctgaccggtctcctggaaggaggcgatggccgtgagaatcgacccctcggcttgggtgacgttgacccgacgagcggagaacgagcggccgtcgcgaaggttctcgacgtcaaacagcaggtcttgacgaatatcgccggcggcaatgaaatagccatgcaccgaatgcggcaggcgtgaagggcccacggttttggacgcggcgatcaccgactgggcgatgacctggccaccgtagacgcggccagtggggaagtacatactctcgccattgatgtatgtgtgattgcggtaagcggaaggctcgcccaacttcagcaccttcaccagatggtccaatggagttacggtggttgcctgagccatggcgttcctcgattcctgttctgctgtgttcgatattcggttatcgtattccaacctatggttggcagtctatccggtgggggttaagagttccgggagcgaaatgtaacgagactgtttggaaggtaaacggttggttatgcggtgcgttcgctacgttgctgctgcactgccggtgtgttgccggtgcgttgccgtaggtgactgtgggattttatgggatgcggggcggggcagccatggagcaattatgggaaagccgcccctgagggacggctttcgacgtataaagcgcgttgtggcactaatgccggcgtatctcagccgcgcacaagcttcttgtgcaggcggtgcgggcgggccgcatcctcaccgagtcgggccaccttgttctcctgataggcctggaagttgccttcgaaccagtaccacttggccggattgtcgtcatcgccttcccacgcgaggatatgcgtggcgacgcggtcaaggaaccaacggtcgtgggagatcaccacagcgcagcccgggaactcgagcagcgcgttttcgagggattccagggtctcgacgtccagatcgttggtgggctcgtcgagcagcagcaggttgccgccctgcttcagggtcagggccaggttcagacggttgcgttcaccaccggacagcacgccggtcagcttctgctggtcggcgcccttgaagccgaagctggccacgtaggcgcgggtcggcacttccacgccggccacctcgatgaagtcgaggccgccggacacggcttcccacaggttcttgttcgggtccaggccttcacggttctggtccacgtagctgattttgacggtgtcgccgatcttcagctcgccgctggtcagcggttccaggcccacgatggtcttgaacagcgtggacttacccacgccgttcgggccgatcacgccgacgatgccgttgcgcggcagcgtgaaggacaggtcgtcgatgagcacgcgatcgccgaaagccttatggatatggttggcttcaagcacggtggagcccaggcgcgggccggccggaatctgaatctcggagaagtcgagcttcttgttgttgcgtgcctcgttctccatctggtcgtaacgttccaggcgggccttgttcttggcctgacgggccttgggggaggagcgcacccagtcgagctcgctcttcagtcgcttggcgagcttggcgtccttggctccctggatctccagacgcttggccttggtctccaagtaggtggagtagttgcccttgtacgggtacaggtggccgcggtcgacctcgcagatccattcggccacattgtccatgaagtaacgatcgtgggtgacggcgatgacggcacccttgtactggtgcaggaactgttccagccacaggatggactcggcgtccaggtggttggtgggctcgtcgagcagcagcagatcaggggcctcaagcagcagcttgcacagggccacacggcggcgctcgccaccggagcacacgttgaccggggtgtccggatcggggcactgcagggcgtccatcgcctgctcaagctgggagtcgaggtcccagccgtcggcggcgtcgatctcggtctgcagcttgcccatttcttccatcagcgcgtcgaagtcggcgtccgggttggccatttcttcaccgatctcgttgaatcgggcgaccttctcggcaatcgggccgaacgccatcttgatgttctcgcccacggtcttggtgtcatccagcggcggctcctgctgcaggatgccgaccgtgaagcccggggtcagcgtggcctcgccgttgctcacggtctccaggccggccataatcttcagcagggtggacttacccatgccgttcgggcccacgacgccgatcttcgcgccgggcaggaagctcagggtcacgtcatcgaggatcacgcggtcgccgtaggatttacgggccttgatcatctgaaacacaaattcagccatatgttaccttatcgttcaagaaacgctgattttccaacgttttgcgggacccggaccccgcaatgacaccaatggaaaacgacgcgaccgtttacgggggtgtcccggacggcccgttgtgcgtcattcgctgttgtggttgtcccgtgtcatcgccggcgccttggtcctacgcaaaagcactttgcggattattccatatcccgtctacacgatgcaatggggttctggcgggcgggaattagcgattcggtcatcgggaggagacgtggaaggtggcggcgatgccgtcattgccgacgccggtaaatggacgctgggcatgccctgtttcctgagcgagagcccggccctgtatcgtctggcgatttgtcgatcgttgcgattccggcgttctgtcgggctttcatttcgaaatgacgcatctggaatagtgcggccgtctttggtgctcctctcttcagtgatccgccgaggttacgcccatggctgaacgcccggaatgtcccgcgaaatccggcgagacggtctaggccgcggatgtaccgtgaatggcgcataggcgtgtcggtcgccgcaatcatggcaatgagaggaaaccccgttatggatcatgcatcccgatctcagcatcagactcaggccgatgcgtcttcgatctcttcaacgaatccgacggcctcgtcgccgctgcccacccaggcgccgccgtggggcgcgctgtgggtgatggccctgggattggccatgatcgtgctcgacagctcgatcgtcaatgtctccatccccaccatcatcgacgacatcggcattaacctgaccgacgcccagtgggtcacctcgctctacaacatcgtgcttgccgcgttgttgctgcctttcggcaagttgggcgacgccagagggcgcaaactggtgtttcaagccggtaccgtgatcttcgtggcgagttcggcgctcgccgccgcctcgcagggtgcggggatgctgcttgccgcccgtgtgctgcagggcatcggaggcgcgatgatcatgccgaacaccctgtccacggtgtccgccctgttccgtggcaagtaccgcgccgcggcgttcggcgtctggggcgcggtgatgagttcggccgccgcgcttggtccgctgctcggtggcgtgttcaccgagaccttgggatggcgttggatcttcctggtgaacctgccgctgggcatcgcggtctttgtgtcggccatcttcctggtgccgcagaccggtgggaacgcctcggtcgccggtgccgcggatgccgcgcaggatgtccgatcccgtcgcgtcggtgtggatatcccgggcgtggtgttgtctgccctgacctcggccctgttggtgttcggtcttatcgaaggcgagacctacggttggtggaagcagacctcaacgcagttgaagctcggcgggttgagctggaatcgtgactggttgtcgccggtgccgatctgcctgatcgccggcgcgcttctgatggccgtcttcatcgtcttcgaatccgcgcggggcaaagccggtcggccggtcatgctggacatgaccctgtttcgtatcaggacgttctcgtggggcaatctggcggctgcggccatcgccgccggcgaattcgcgctggtgttcatgctgccgctgtacctcatcaacgcccgcgggctcaacacgctgcaggccggtgcgatgctggccgtgatgggcttggggtccatcgtcgcaggtgcgcaggcccatgtcatggccgccaggctcaccccggccggcgtgattcaactcggtcttgtgatcgagatcatcgccgtcgccctggtcgcggtccttatgcctgtgggattgtcggtgtggtggcagcttgttcccatggccgcgtacggtctgggtctgggcttcgcctccgcgcagctga

SEQ ID NO: 2942 - DNA, 16865 bp, Unknown
  R19_24m  MAG No. k141_4819
gacgcataataatacggaagggctacgtacatcgttacgaggtattccgttatacgatgaaatccatccgcggtcggcctacactggtcgtttatgacagcacatcaggcggcgctggaggcgctcacacgatacttcggctatgactcgtttaggcccggacagcaaggaattgtcgaggctttgcttgccggacgcgatgtcttgggcgtgatgcccaccggcgcaggcaagtccgtgtgctaccagattcccgccgcgctcagcccgggtgcgactttggtcatatctcccttgatttccctgatgcgcgaccaggtcgatgcgctgaacgacctcggtctgccggccgcgttcatcaacaccactcaaactcccgacgagcaggcgatggtgttcgcccaagccgccgccgggcagatcaaactgctgtacgtggccccggaacgcttggaaaccgggcgattccgcgactttgccgcccgtacgccgatctcgctgatcgccgtggacgaagcccactgcgtttcccagtggggtcaggacttccgctcgtcgtacttaggtatcggcgatttcatcgccgggctgccgcagcgtccaccggtgggtgcgttcaccgccaccgccaccgaacgggtgcgccgggacatcgtgggactgctgggattgcggaatccggccgtcaccgtcaccggattcgaccggccgaacctgtattttgatgtggtcaaactggagaccaaatacaaggccgcatgggtggcgcggtatgtggccgaccatccggacgaatccggcatcgtctactgcgccacccgcaagaccaccgaagcgctcgccgacacgctgaaccagatggggcatccggccgtcgcctaccatggcggcatgtcgccggacgcgcgtgaggtggcccagcgcgacttcatcaccgacaaggtgccggtggtcgtggccaccaacgccttcggcatgggcatcgataagtccaacgtgcgttacgtcatccaccacaatctgcccgaatccattgaggcctactatcaggaggccggccgcgcgggccgtgacggcgagcccagccgatgcacgctgctgtggaatgagtcagacatcgtcacccggcgtcggttgctggataacgattatgagaacgagcgattgactcccgaagagcaggagatcgttcgccagtccaagcgccggctgctggacggtatggtcggctactgccgcaccaccgactgcctgcaccggtatatgacccggtatttcggtcaggaattgtcgtcgaatgctggttccacggcgggcgaagacattgcggcggactcttcgcagtccggcagatgcggtgcctgctcgaactgcgaaagcacgttcgagaccatcgacgtgacccgcgtggcgcaggcgatcagccgttgcgtgcatgacgtggggcagcgcgtcggttccggcaagatcgtcaagatcctgcgcggttcgcgggcacaggatctggcatggctgaacccggagcggatgcccaccttcggcatgctcaaggacgtgaacgaggctcgcgtgcgcgacgtgttgagccagatggccacggacgggtacctgtcaatcgccgaagggcgtatgccaatcgtcatgttcggtgcgcgggcggccgaaaccgccgctcccgacttccactatgagatcaaacgggtggaacgcaagtcggcggcggccggttccggtcggagcgggggagtggctgatactgccgattccgccaatgttcccggcgatgcgctgggctcgtatatcccggacgatgacgaggaatcgctgttccagaagctacgcgaactgcgacgcaccatcgcccaggaaatcggcaagccgccgtacatcgtgttctccgacaagaccttgcgcgacatggcccgcatcaagccggttaccaacgcgcaatttctggcggtcaacggcgtcggtcaacacaagctcgacctctacggccagcgcttcatgcaaaccatcgcctcgttcaatgccgggagtgcgtcataacaatctcctatagcgaaccgcggagtatttgcgggcgttcttgggctggcgcgactacgatgactgttcgatacttcatgaccgaacactcagcaagtagaaaggcaacagcatggcagaagacaaggccgaaaagcccgtcgtcgaatcattccagcttgatcacaccaaggtcaaggcgccgtacgtgcgttacatcgacaccgaaacgggccctcacggcgacgtgatctccaattacgatctgcgcctgacccagccgaacgagcaggccatccccaccggcggcctgcacaccatcgaacacaccatcgccgtgctgctgcgtgaacgcattcccggctacatcgactgctcgccgttcggctgccgcaccggcttccacctgctgacctggggcacccactccaccgaggatgtggccaaggcgttgaaggaatcgttggagttcatcgcatacaaggccacatgggatgacgtgcccgccaccaccgagaagagctgcggcaactatcgcgaccacagcctgttcgccgccaaggaatgggccaagcagatccttgaggaaggcatcagctccgacccgttcgagcgcaaggtcgtctgattcgtctgattcgattcaattctgattcggctcccgctggcgggagccgggggcgaagccgactgagggtggctgtcctcaactcggctggactgtccggctcctgcggacgggagtcattgtttattagtgtccgtcatgcaacgcggacgggatttcttgtgcctacggcatggtaggttggccgtcagttagtcgccggtcaccgtgccggcaacccggcatgtcggagaggtgagaagtgactcagtcgaacgctgcaaacaaggcgacaggccgccgtttccgccacgccaccatgcgcgatctgccgcagatgcagaaaatctacgcacgcgcacgcgcgttgatggccgccaacggcaaccccacccagtggggcaacgaatttccgcgtgaatcggtgattgaagacgacatcgccaaccagcgtacgatgctgctggtcgacacctgcaatggccacgaacgcattctggcccagttcgccctgtgcccgggcaaggatccgacctacgccaaaatcgacggcgcctggctggacaacgacacctatgtgaccatccaccgcatcgccgcatccggtctggtgcgccacgcggcccgcgactgcatcaggtgggccctgaagcactacggcaacgtgcgcgccgacacccaccccaataacaaggccatgcagcacgtgctcgaaagctccggcttcgcccgttgcggcctgatccagctgctcgaccggccggtcgacaccaccagaatcgcctatcagcgccacgagtggtgagtgtggctgtcgccagcgtgttcggttccgcggtggagctggtcaggtaaggtccacgtcgtcgcgcacgtacggtccgtcggccgcccgttcaaactcgtgcatatcgcaaaaaccgtacgctgaaagtaactcagcgtacggttttcacgaaagcagccatcgactatcggtcagccgatagacctcagtcctcagtcgcagcgaccttggtgtcagccccggccttctgctcaaggccgagcttggagcgcttgcggctgtagccgaagtacacgatcaggcccagaccgaaccagatggcgaaacgcacccaggtctcccagttgagaccggcgatgagcacgaagcagaatacgatggccagaatcggggtgaccggcacgcccggcgcgcggaagccgcggggcgcattcggctgggtcttgcgcatccatagaataccggccgacacgatgatgaacgcggacagcgtaccgatgttcaccagctcgaacagcacgttgatgttgatgaagccgccggcgaacgcggtcagcagaccgaagaaccaggtgcccttgaacggggtgcggtacttctcgtgcacgtggccgaagaacttcgggaacaggccgtcacggctcatggcgtagcagatacgggactggccgtacagctgtacgagcatcaccgtggtcatgccgatgagggcgcctaggttcacgatcaccgcgagccagttcatgccggtctccagaatcacgccggccactggggcgtcgatgtacttggcgaactccttgtagggcaccacgccggtcatgatcatggtcatgacgatgtagagcacggtggaaacggccagggacagcaggatgccgcgcggcagtgtcttgttcgggttgatggtctcctcggcggaagaggacacggcgtcgaatccgatgaagctgaagaacacgatggatgcggccggcacaatgccgtacggctgggtggagccgggctggaaagtgtagatgccgtacggggagaacggctgccagttggacggcttgacataccacacggcgcacacgatgaacagcacgatgatggcgagcttgatgagcaccatcacgtcattggtgcgcttggtctggttgatgccgatcgagagcacccacgtgatgatcagcacgatgacgaaaccgggcaggttgaagtaggtggtgacgtccgggttggtgccgtaggcggcggtcagctcgaccggcagatgcagtccgaagccttccaacaacttgttgaagtatcccgaccagccggcggacacggtggccgcctgcagagcatactccagaatcagatcccagccgatcacgaaggcgatgagctcgccgaacgccagataggcataggagtaggccgagccggacaccggtgccatggcggcgaactcggcgtagcacaggccggcgaaaccgcagcagacggcggccagcaggaacgatacggacagggccgggccggcggtgagcgcgcccttgccggtgagcacgaagataccggtgccgatgatcgcgccgataccgagcatcgtcagatcgaaggtgcgcatcgtgcgcttcaggggagtggattcggcgacaagctgatccacgcttttcttacgaaacagatccatgttcttctctcatgaaacttaagatatggggctagaccggacggatttccgggatcccggcacgcctcaacgccgggaatcaaaggcggcttccgagaaaccgcatatcggtcattagtgtacgactgccgggcgaaaacaaacgattatgaccacacgtcacattcctgcgcaacaataggtgcctatgagcatgaacgcagcacccgaaatcgcattctcgtccgagcagggcaaggccaactatgcggccacccgccgccaataccccgcacaggccatcgtgaacctcaaaaccatgcgcgacaacatggcccacctggtctccgtggtcggcggcccgaactccggcacggcggtgatgggcgtggtcaaggccgacgcatacggccacggactgctgcccgccgcactggccgcgctcgccggcggcgcgacatggctcggcaccgcgcaatcgcatgaagcactgctgctgcgcaaactcggcatcggccccgaccgttgccgcattctgacttgggtctacaacggcaccgaagcgccattcgatgagctgatcgctgccgatatcgacgtatcggtcggctccctgcccggcatcgatgccgtggccgccgccgcacgcaagctcggcaagcccgcccgcgtacacgtcaaggtcgattccggcttcggtcgcaacggtttcacgccggccggattcgacgccgcgctcgccaaactcgtgccgctcgccaaagagggcgtgttgcatattgtgggtcagtggagccatctcgccgtggccgattcgcccgatgtgcccgaattcgtgtcctccaccgaccgccagatcgaaacattcaaggacttcacgcgccgcatggaacaggccggcattccgccggagatccgtcacctggccaacacggcggccactttggaccgcccggagattcacttcgaacttacccgccccggcatcggcctgtacggctacgagcccgatcccgcgatgggcaccccgcgcgactggcatctgaccccggccatgcgcctgcaggcgcagctcggcacggtcaaggatgtggaggccggccatggcatctcttatggccgcacctacctgaccccggacaacacctcgaccgctattgtgccgctgggctacgccgatggcatccaccgctccgcttccggtttcgatatggaaggtgccaagcacgtggagaagccgggcggcccggtgcgcatcatgaccactgaaggtccgaagctctaccgcgtgtgcggccgcgtgtgcatggaccagttcatcgtggacctgcacggatccgccgccgaactcggcgttcacgagggcgacacggtcgaactgttcggcccgggacgcggcgaggattacgttgagcctaccgccgacgattgggcccgcgccgccgacaccatcagctacgagatcttcacctgcctgcgcaaccgcatcccgcgcctttacgagcatgccgccgaagtgctgcccgccgccgacctcgccaagctcgacccggccacgctgctataaggtgcattaccgccatacggtggcaccccgtaatcccttcttcccgaatatgtaccactgacatgtgctgagcgtcacatattcgggaaatcggccccaatctcccgaatatgtgccgttgagttgacgtcagtggcacatattcgggaagtcgggattactgcggccgatatgtgtgcctatgcttggcatatggaaacgacgttggatggggaacaggtgctgagcgatgagggctacagcgccttcgacgaggagcggtgggcacccgagccgcccaaatccaagtcgcgcacggctttcgaacgcgatcgcgcgcgactgattcattcgtccgctttgcggcgtttgggcgcgaaaagccagattctgattgccggtaccgacgatttcgcccgcactcgactgacgcatacgctggaagtcgcccagatcggtcgccaaatcggcgcattgctcggctgtgatccggacgtggtcgactgcgcctgtctggcccacgaccttggtcacccgccgttcgggcacaacggggagcgtgcgctcgccgacatcgccagcaatatcggcggcttcgagggcaacgcacagaccatgcgtatcctgacccggctcgaacccaagatctttcacccggacgggcgttcggccggcgtgaacctgacccgtgcggccttggatgcggccgtcaaatacccgtggaccttggccgaagccgaccgacacccgaagggggagcggtcgaagaagttctgcgtctacccggatgacgaaccggtgttccgctggctcaaaatcggcgcgccccaggccgccaaacccatggaatgccagatcatggacctttcggacgatgtcgcctactccgtgcatgatgtcgaggattccatcgccaccggcgcgttcgatccgattgtgctcgccgatccgaagatgctggaccacatcatcgagcagacgcgcgcatggtatggggcgaagtgggatgccgacaagctgctggccgcgttcatgcgattgcgccgagagcatttgttccctgcacatttcaatggttcgcgcgaatcgttggcacagctcaagaacatcacgtccgatttgatcggtcgcttctgctggtcggtggaaaccgccacgcgcgacacgtatgggcccgggccgttgacccggtattccgcgaacatcgtgattcccgaggacacgaattacgagatcgtggcgttgaagggcatcgccgtgtacttcgtcatggcgcctcgcgagcgcgagccattccatcaggaggagctcaagatcgtatcggatttggtcgatgtgcttatggccgattcgccgctcccatccaacgctttggaaagccagttcctggccgattggaatgaatccaccaatgacaacgagcgcctgcgcgtcgccatcgatcaggtcgcaagcctgaccgacaactccgctctggccctgcactccatcttgtgctgagggcgtgttggacgggtgcttccctcagtctcgctgcgcgagccagctcccctcgggtgaggggagctgtcgctgtaggcgactgaagggagtttcgcggaagaaatgataaccgacggtaaaaatttaccgtgtctcaggtgaggcggtactctagagacttatggtcggaatgattaagaaagaagatgtcgagaaggtgcgcgccgccgcggacctgtatgacattgtatctgcgaccgtaacgcttaagccctccggcaccggcaccttcgtgggcctgtgcccgttccacgacgagaaaaccggcagcttcaacgtgcgtccctcgctcggcgtgtggcactgcttcggctgtggcttgggtggcgacgtattcaaatacgtcgaacaatccgaaaacatcgacttccgcgaagccgtggaactgctcgccgacaagtaccatatcgagctgcactacgagagcagcggcaacggcccgaaccgcgagaacaccggctccaagcgcacccgactgctggaagcctgcgaggaagcacagcgcttcttcgtctcccagatcctgaccaaggaagcactgcccgcccgcaagctgctcggaggccgcaacttctcccaagccgactgcgaacgtttcggttgcggctacgcgccccaaggttgggataatcttgtgcgccacttggcctccaaggggtttacgcagaaggaaatcctcgacgcgggcttggcccgccaaggccagcgcggcatctatgactatttccgcggccgcgtgacgtggcctatccgcgattcgaccggccgcacgctcggcttcggcgcgcgcaaactatacgaagacgatcagatcgccgccaaatacatcaacacgccggacacgcagctctaccgcaaaacccaggtgctttacggcatcgatttggcgaaatccgccatcgtcaagaagcgacaggtggtgatcgtcgaaggctatacggacgtgatggccatgcacttggccggcattgacaccgccatcgccacgtgcggtacggcgttcggcgccgagcacgccaagattgtgcgccgcctgatcgccgacgattcgctgggcgcggtccagctggtcgggccgttgaaggtcaaggaccagccgttgagctcgcgcatcgtgttcacgttcgatggtgacgccgccggccagaaagccgcgctgcatgccttcggccttgattcggccttcctctcccaaaccttcgtggccgtggccgacgacaatctcgacccgtgcgacctgcgcatcgagcgaggcaacgaagcagtgcgctcgctgatcgcccgcgccaaaccgttgtatgacttcgtgatcgacgccgccatcagccggttcgacctgacctacacgcccggccaagtgggtgcgatgaaagccgtggccccgctggtggcgcagattcgcgaccgctccctatgggacgcttacgcgcgcaagtccgcgggccgtatcggcgtggatcttgaggtgatgcgccgcgaggtgatgaacgcgcgccggcagatgcatgtacgcgatgaggacgcctacgcgcccaaacgtcgattcgagcgtgacgagccgcgtgtggaacccggcaccaacccatacgccaatccggccacgcgcaaggcgttggagcgccgtgacgccgccgaacaggcatatttcaagatcgacgacgccgtattcatcgccgaacagcagttcatggccgtgctgattcaggtgccgcgcgccatcgaccgcaccatgttcgggcagctgaccatcgaccatttcatgacttcagtgttccgcaccctgttccaggcgatcgcggccgccggcggactgccatccgacgataccccgcaggggctgtggatgcacaacctcaccaaggccggcgggccgatgctgaatcaggtgatcaacgagctggccgtcatgccgttgccactgcctggcgacgacaccggtagcggtgcgcagccggtgcaggccaacgtgtcgggaggaggtgttggcgtgaatggcggtgccgccgcagtacagctgcgtcctgccacgccggaggagcagcgctacgccactgagcttctcacccgattgttggacatgggcttcatgcgccagatcggtttggccaaacgccgcatggcccagctgcccgacggcgaagagaagataaccctcctcggccagatcacccgcatggaaaccgcccgtaaagacctccaagcccaaatctacggcaacaccgtcggctaatacctcccactgattgcgcgcatcttcgaatacgtgccggatgcataaggccatacaaccggttgccggattggatgggtgcagaagttgcggattggccccatccaaattggactggtctgggtggggccaatccgattcgttcaataatgaagcacgataccaagcagcgtcgaaacgaagggaaactcatgacgcagaatcgtgcggaactcaaccgcaatctggcccagatgctcaagggtggcgtgatcatggacgtcaccacgcccgaacaggcgaaaatcgcgcaggatgccggcgcgtgcgcggtgatggcgctggagcgcatccccgctgacattcgtgccgccggcggcgtctcccgtatgagcgatccggccatgatcaagggcattcaggaagctgtctcgattccggtcatggccaaggtgcgcatcggccacatcgccgaagcccgcattctgcaggccatcgacatcgactacatcgacgaatccgaagtgctttccccggccgacgacgtgtaccacatcgacaagaaccagttcgacgtgccgttcgtgtgcggcgcgaagaacctgggcgaggcgctgcgccgcatcgccgagggtgctgccatgattcgtaccaagggcgagcccggcaccggcgacgtgattcaggccgtgcgccacatgcgcaccatgaacaagcagatccgcgagctcgtggccttgcgcgacgacgaggtctacgaggccgccaagcagctggccgtgccctacgacctggccaagtacgtgcacgacaacggccgtctgcccgtcgtgaacttcgccgccggtggcgtggccaccccggccgacgccgccctgatgatggaactcggtgccgaaggcgtgttcgtgggctccggcatcttcaagtccggcgacccggccaagcgcgccgccgccatcgtcaaggccaccgccaactggcaggacgccgatctgctcgccaagctgtccgaaaacctcggcgaagccatggtcggcatcaacgaggacgagattcagaccatcatggccgctcgcggagagtgacgggagtcgaagccggagaggacaacatggttgtagctgttgaatatatttccaaagaagagtccgcggacgtcgaaaacgtcaagcacggcgtgaccggcatcctggccgtacaaggcgcattcgccgaacatgcggcggtgctggacaagctcggtgcgccgtggaaactgctgcgcgcggccgaggatttcgatgaatccatcgaccgcgtgattctgcctggcggcgaatccactacacagggcaagctcctgcattcgaccggactgttcgagccgatcgccgcccacatcaaggcaggcaaaccggtattcggcacttgcgccggcatgattctgctggctaaaaagctcgacaatgacgacaatgtctactttggcgcgctcgacgccgtcgtacgccgcaacgcctatggtcgtcagctcggtagtttccaggccaccgccgattttggtgcagcggatgatccgcagcgtatcacggacttcccactggtattcatccgcggaccgtacgtggtgtcggtcagccctgaggccacggtcgaaaccgaagtcgatggccacgtggtgggcttgcgtcaaggcaatatcctggccaccgccttccacccggaactcacggacgatacccgcatccacgagctcttcctgtcgctgtagtcgattcgtctgccgttagactggtatccgactgacgaatcaaggagacgatctgccatgcagcttgagctgaatcgacgcagcaaggtgccgatgtaccggcagctggctgccgagctgcgtgaacagatcgtctccggcgcgatggccgagggctaccgcctgcctcccgaacgcgagctgtcctcgcgtctcgaagtcaatcgcaccacggtgttgcaggcgtatcagcagctcaaggacgaaggtcttatcgcctccaaagtcggcaaaggcacgttcgtgctgccggctgcctccgcaagccgaacaccgcacacgtcaaacagtgacttcgggaatgcgataacgcgaacaacacgatcgtcggcagaaatgggaacatcgcaagcctcctcttccggcggcgtagaacgtgctacctccactggtttcttgacgacggaccagggcagcagctctgcggcggtccatacgattcgtgaaagccgttcggttcagggcccggagccaaccgtcgtgcgtccgccatggtcggtgttgttctctgattattccaaccggtttacctaccatgacatcgcctcggccgagcgggcgcagcgtggcgacaccattattgacttcgccaccggttcgccgaacccggcggatatcccggacgatttgttgcgcaaggtgagcatcgaggcgttcgaatcgcgggaattcgacggccaaccggaatcacctatcgagggattcgaagagttgcgtgcgctgcttgccgaacatatgcgcacacgaggcgtacaatgcggcgtccgcaacgtgatggtgctctccggttccgagcagggcatcgacctcatcgtgcgcgcgttcatcaaccccggcgactgcgtgctggtcgaacaatccacgttcttcccggcattgcagaccttccgttcggcggatgcgcgcatcatcggcgttccagtggacgagcacggtatgcgtacagacctgttggatgggtattgcgcgcgattccggcccaagctcatttacaccgtcccgacattccaaaaccctaccggtaccacgctgccgcccgaacgacgcagcgaactcatcgacgtggcgcggcgctatcagtgtctgatcgtggaagacgatgcttacggcgatttgtggtacggcggggaatcgtccgacgcacatcgccccataccgctcaaaggcatggagaatgcgggatacgtgatgtatttgtcgacgttctcgaaaaccgtcacttcgggcctgcgcacgggatgggttgtggccgacccgcatgtgattaaccggctggcggctctgcggcgcatggtcgaccagcatacgagcacgtcatcgcagcgcatctgcctggaactgcttaaagaaggccgcatcgccgaacatttgcgcggtttgatcaagacttaccgcattcgacgagatgcagcaatcgcagcattggagcggtatgcgccggatgaagtgtattggaccgtgcctgcaggcggctactatatttgggtttccttaccggacggcgtgcgctctctggatgtattggaatcctgccgttcccaaggcgttacgttcatgccgggcagcgtgttcgacgttgacgaaatggatgattcccatattcgtctcaactttgtgcgcccggatgctgctgacattgataccggcattcgaatcattggcgagacgatagcacagatgtagccaagtgactggctcattgcggttgtcgagttttttgatggctgcatacccacatcgatgggtgcattcgacgaataaataagcgaggaagccatcatcagttcgctgtggcatgcgcatagcgttgtcgggcgaacggggcagaccacgtggtcgttgcgtgacctggccgatcgagccggcatcgcattgcccctggcgtagtggcgaggtggcgcagtaacgagtcacgccatcgcgagccgatgatgcgaaatgcggaaccggtcgcggccatcaacggctatcatacatgcggaagcaacgatacgttggcgtcagcacatccatctgactccagaaagggacacgatatgaccacatcctccgtttcgccggtgaccactgaactggcgggcagcgaaaccggcatcacgcttatcattcacgccggagcgggcagtcgtggcaagcgcagcacgcctgaacgcatcgcccaggtcgaacttgatctgcagcgcgccctcgatgccggataccagttgttggaatccggagcgccggcgcatgaggctgtggtcgccgccatccacgtcatggaagacgctcccgaattcaacgccggccgtggtgccgccctgaccagcgatggcatcgcccagatggacgcctgcctgatgaccggcgatggcgaggtcggtgcggtcaccggcgtaagcaccgtgaagaacccgatcgatgcggcgcgtgccgtcaaagagcagaccaagcatgtgctgttcgcggacccgaccgatgccgagatcgccgattggggcgtcgcgaccgaaagcaacgagtacttcatcaccgaacagcgtcgtcagtccttggccgaggctcagtccggtggcgatgagtgggagaagcatggcaccatcggcgccgtggcgcgcgatgccgaaggcaatatcgccgccggcacgtccactggcggcatcaccaaccagatgcacggtcgtgtaggcgattcgccgctgcccggttgcggcacgttcgccaaccagtccacggtggcggtgtcctgcaccggcatcggcgaggcattcatcaaggtggtcgccgcccatcaggtgtcggatcgtgtgcgtttcgccggcgagaacgtcgaggatgccgcgacggccactttggacgaagtcgccgcgcatcatggcgatggtggcatgatcgttctgccggcggtcggccgtggcgtggtcgcctacaacagcgagatgatgaacttcggataccgtagcgcgcaaggcggtaaggtgcagggctgattgcccccctgtattgcggcatatatcataatggccggtgtgctgcggattcttggtaaggaatccgcagcacaccggccattcatgtatgcggcaagtgccgccgatcagtgcggcagtgcgcgctacttggtgatcgtgttgtacgtgggcatgttcgtgtaatcgaactgcacgttcttcacgttctgtgcagacacggcggcgaaacgtttgaccgggaatactggggtcatacgcaacttcatcgctcctcttcctcgaatgaaactatgttccattggtatgagccagccacgtacggtattcgtgtctggcctgccacacaatgatgcagccgtatatacgggcacagcattgcgcggcagttcattgtatggaagacatgcaaactcaatgtttccttgtccaaataaaaaaacgagcgcggctgatgtgcggcaccggtccaaaaactcatgtccgccagcgcaacgcgactacgtaccttatgccggtctgcgcgtagaatagaacggctgcgatattgggttattcacggaggaatggatgcgacgctggctgatcaatgtagccaaaaatgagacgattctcatcgtcgccgcaatactcgccctgatttcgtgtttcattgtgccgccggacgccgattacaaaagctacattcacgccagcaccatcagccagctcatctgcctgatgattgtggtgtgcggattccagcgtatcggcgtgttccgcatcgtcggttcgcgattgctggagaaggtcagcaccatgcgcggactggtcattacgcttgtcgctttgacgttcttttccgcgatgttcatcaccaatgacgttgcgctggtcacgtttgtgccgttcgcggtggccgtgctcatcatggctgggcaagaggataagaccatcctcgtggtcacgctgatgaccattggcgcgaacgtgggcagtatgctcaccccgatcggcaacgcgcacaacctgtatctcaaagccctgaccggcatgccgaccatggaattcctcggcatcatggcaccgtattccggcacggcggccgtgttgctggtcatcgtgatttccgtggtgtttggcggcaaaccggtcggcgacctgggcgacctcgaaaccggcgtgctggctcccgagcgcaacaaacaccagcccgacgagattcgtatcaccggctacggcgccggttatggcggctggcgcaccatcgtctactcgctgctgttcatcgtctgcctactggccgtctccgacgtgattcccctgtgggtgatgtgcgtgatcgtggtcgtcgtgttcctgttcaccgatcggcgcgtattcaaatacgtggattggggactgccgctcaccttctgcatgttcttcatcttcatcggcaacatgaagcgcgtgcccgaattctacgaactggcgcgctcgctggtcggcggccatccgctggaggtggcggtcggctccagccaggtcatcagcaatgtgcccaccacgattctgctttccggcttctgcgaccaatggcgcgatctgatcattggcaccaatttgggcggcatgggtacgctcatcgcctcgatggcctcgcttatttcttacaagaacgtcgtgcgccaatacccgcacaagaaaggccggtatctggccgtctactccgccgtcaacgttctgtttttggccgtattgctgaccttgagctggatcatcgagccgagtctctgagcc

SEQ ID NO: 2943 - DNA, 7319 bp, Unknown
  R19_24m  MAG No. k141_4865
gctcgtcctgatcgacgattacatccactggtacaaccatgagcgcatcaagcaatcactcggttggatgagtccggtacaataccgtcagagccaaggaatggctgcgtgattatctccaagaaaacgtccgcagcccccactcacccctcgccagcgtgaaatctgcgcactcatctccgaagggctcatcaacgaggaaatcgccaatcaactcaccgtcgaacctgcctccgtcaaacgtgccgtgacccgtatcctcgcaactttgggcctacgcaatcgcactcaaatcgccatcggctggttcaaagcaggcatgtagacctgctatttgctcagcagctcattcaagcggattgttgttacgaatgcgactaccgcacgcccccccccaagacggattccatgttcgacaccccattcggcaaggtgggcttggcggattttagtggtggttgcaacacctgtgtgttttgccgctcttgatggcggtcttggattggtgcgatcgtatcatgctgtgttgatgagttcgagtattttctcggatggtttcctgtagccgagtgttttgcggggccggtcgttgagttcctcggcgaccgcgtcgaggtagtcctcggggtatgcgctcaggtcggtgcccttggggaagtattggcgcaggagcccgttggtgttctcgttggtgccgcgctgccagggtgaatgcgggtcgcggaaatacacctgcatgtccagcgtggtcgagatgcgtttgtgcagggtgagctcgcttccctggtcccaggtcagcgagttcctcaggagcttgggcaggtattgcattttccggatgacggcctgccggacgtgtttggcgtcgtgcccgtcgggcaggtgcaggaggatcgtgaaccgtgtcgagcgttccacgagcgtgccgatcgcgcttttgttggccgcgctgcagatcaggtcgccttcccaatgaccgggtatcgcccggtcctcgacttcggcgggccgctcgctgatcatgatcatgagctcgcggaaacgggcctgcgcgaacccgcctgcccgtgcggccggcgttgggcgcgcccgctcctcagggccttgatgacgtcctttttcagttcgcctttggcctggacgtagatggcctggtagatcgtctccgcgcacacatgcatagcatcattatccgggaaatcggcgcgcaggcgccccgcgatctgctcgggactccaatgcgcccgcaatcctgcacgaatgtatgcgagcaggccgggcaccgtatggatcttcgcgggcttgggtcgtctgggccgtccgcgctcatctgctggggccggtacggctcgtacatgccggtcgcgggattcgtgttgcgcaccagctcgcggctggcggtcgacgcgagacgattgagcgtgcgcgcgatcccgcgcacgctcatgccggccttccgccagtcggcgatgctgatgcgctcgtcctggctcagatacctcgaactgatcttttggggaatgtccacggtggaacgataccagtccaccgatggcttctcgttcctgccgttcgatcgtgtccttccgttgcgccacaccttgccggtgcgtttggacacgcccaccgcccgcgcggcctgcgtgaagttcatgcccgcctccagcagctcggcgtagcggcgccgccgcgccgcgcacatctcgccacgcgtcgcgtactccacgccctcgaacacccacctgtccacctggccctcccatcagtcagccaggcgttgcgacgatcactggaacccgcccttcgccattttttttgggggggaagagagagaccggtggcggcaagtgtgcgatgggagtcggatgcatcgtccttgcggatgatgcgcaggttcattcctttggccgatggatagtttcggcgaatcgagggagcatggagctatcgtcatgcgattggcctgacatgttgttgcgtttgcggccgctgaagggtgaaatagcggcgacattgcaacgcgcgggtctgggcaaggcatcctgcctttgccttcaggcccgcctttcgtgaagggtgattatgccagttatatcggctacgaatctctcgatcgggtacaagggttccccaatcgtcagcaacattaacctgcggttgagcacgggtaggattatctgtctgcttggggcaaacggcgcgggcaaaaccacgttgatgaagacgctactcggacggataaagcccgtgagcggagaggtcacgtacacagggacgaatatcaatgagatgtccgcggcgatagaccatcccagtttctttccttacctgagtggtagagagaacgtcgaggtggtctccgcgttctggggtctggatgtggacccggaggcggcgttggacggtgtgggcatcaatcgcgcggtgtatgggcggaaggcgaaggactactcgacgggcatgaaagagcgtctggagctgtgcctcgcccttgtgccgcatccgaggttcctgttcctcgacgagccgcagaacggtctggaccccgatggcatagcctccttgtccgaaacgcttcgcgcctaccgggacaaggggaactgcgtcgtcatctccacgcatctgcttcatgagatccagggcgtcccggacgagtgcatcatgattcgtcacggccgggccgtgcaggtcacggatctgaccggggtgaacctcgcggatctgtatcaggggaggtagggtcttgaacgccgtttcccctgttcgcgcgttggtcgcctactactggaacacgtggtatttcctcgccgcggtgtttggggccgtctcgtcccttctgctgggtgcgtggatctcaagcgcggcgaacggaaccccgataaccggagggtattgcgtctatttcaccgccacccagccgttgatctgtctttcgctgctcttcgcatgcgatgccagggtcgcgaaggcgcactacggtggcctgccgcgccacgtgtattccgcgtggacgccatgctcgctcagggccgtgttccgggccctgatcctgacctccgtgaacctgattggcgtactgtgcttcgacgccatcatggtcctgacgggtaccggaatgcacccgcatctggcagctgtcctgtgcttcgtcgtgctgcagagccttgcgacctccctgatctactcgatcgtcgagatcgccgccgatcccagaaccgccggaatcgtctcggccatcctttgctatgcatggattctcctgccgggcgaccttcccgactatgcgacgccctacgtcgcgaacgccctacggaccgtcgggctgaacctgaacggcaccgtgatgtcgccggcggaagcgacgagtcgagcgtccgtcggccccgtgatggtcgtcgtcccgatcgtggtgcttttggttgcctatgtgctgttgagccggttccgtcgcgaaggagtggagaggaaatgaagtccctattgcgtattgagcgtgtggcggtgatccgctggtcgacgctcgccttcgtggccgtgctgctgtttccgttgttctttttgcgttacgggaacacgggtgcggtggtgcagtcggcgatggtgatggcgcttcccgtaaccgcggccggtctcgtcttctcccatgcgagggtgccctcctcgtaccgttccttcagcatccacgaccggctcctgcttcgcttcagcgtgaagtcgctgtcgctcggcgtcgtgatcaacgtctgcctgactttgctgtacgggcttgccgtcgggctcgtcgtcaacgagccgctttcgtcgcgtaccattctgatgcttgcgttcaccgccgtcgtcctttccctggcatgcttcgttctgcgactctatgccagtcctctcgtcgcctggaacgtcgtcgccttcttcatcgtcgccggacttacggtgagttccggcatgttcgaggacgcgccgatgctgtacgccgtcataccaaccacatgggtgttgaacggggtgaaattcgccggttacgtgattccggtcggcgtcgccatcgccgcgataagcgcatgtctgctgttcaaggcggtgaaacgtgtctgaccgaagccgtatacgggtgcactgtttcggatcgtaatcgtccggcagccagctttctcaccgtattccgttgcgggagtgagcctgccgctttccgctgatcccgccatacaaagtcgactccgcacgtcgcgagtcttcgccgaacactatcattggtggcgcagaggtcgtgtgggaatggccgtgacaggggaggggtattgggcaagcttcgggcgccgcgttcggcgcgtggccgtgtgatggcggcggccggcatggtgatggtggggtcgttgggtatccagacgtcgtcgtccctgtcggcgtcgttgttcggcgcgttgggaccaattccggtcagttcgatgcgcatgctggtcgccgcgatcgtcattctcgcactcacccgcccgaaactggctggccggtcgaaaggcgaatggctgggcatcgtaatctacgggcttgcgatggcggcgatgaacgtctgcctgtactcggccatcgaccgcattccgatgggcgtggccgtcaccctggaattcctcggaccctgcgtggtcgccctggccggttcgcatcactggcgcgagggcctgtgcgcggtggtcgcgctggtgggtgtgggcttgatctcgtttacgccgggcggctacttcaatccggccggctacctgttcgcgctgggctcggccgtgtgcttcggcctgtacacgctcttcgccgaccgggtcggcaaggcaggcaccgggctcgacgggctcgccctgtcggtcacggttgcggcgctggccacttcgccggtatccatcactcgcgcgccgcatgtgtcggccgcccagtggggcgtcatcgcagcctcggcggtgctgggagttgcgattccctacacgatggacacgttgtccgggcgtatcacgtcggcgcgcgtggtcggcacgctgttctccatcgaccccgccatgagcgtgattatcgccgcgctgatattgcgacagaccatcaccgcggtggccgtgatcggcgtcatcgtcgtctccctcgcgggtgccctgctggtgtggtcatccggcggcgatgccgtaaacggatgattcttgtcatacgattgcttgacagcatgttgtgaatgcttgagccccgctcataccattcaaatataatggtttttcgcatgattcgttagcgttgacggatcccccaataaggaggtaatcatgtcagatcctcgcgttgaaggcggaagattgtcggtcgcgcccgaggccgtatatacgggtgctctggtgatgttcttcagcaatctcgctatgccggacaccgatccgcagggcaggcccatagtgctgtggttcaacggtatcatcgccgtctgcgccctgatctggggattggcggagacgatgcgcgtccgtaaggaatacccgtggcggtgggcgcgcacgctgttctacgacgtcctgattctcgtcgggctgctcatccgtaattccgattggacccggctcgtcgtgctggtcgcactggtgctatacgcgattgttacggagaaaacggcggcggaaccgcgccggtcctgactgcaagacgatgatgaaccgtcagcgtcacaggattctcgcggtatgcgcacggtggtcgacatcgacacggccgccggcagcgggcgcatgattatttcacgtcgcagacggtgaaggcgaagctggtgagggtgccggtggatttgccgtcggcgaggagctgattgatgtcgggcaggtccttgttgtcgctggtctggttgagggcgtattgggtgccgtcgggcgcggtgaagcgcatgacgggatcgcctttgctgttgtgcgtgcagctgacggtgccgtggtcgacggtgaggggccatgtgtggccgagctggtcggcgctgatgtcctgtgggttgctggtcgcggtgattttcttgctgccgttggtagggtagttttcggggtgttcgatgccgtccatgcaggcggtcagtcccagggccatgatggcggcgaggccggtggcggtgatggtttggatggcgtgtgtcgtgttggtcatgctggtttcctttgtcgtgttcggtggtggtcggggtgcttgttcgtctgccgtcaatgctggtcggggtgttcctcgatgaggaccatgtagccgtcctccaatgtggggtccatgggatgcgcgtcggcgggcggggtgtcggtgatgacgcggtagcgtacgccgcgtgcggtggtgacggcgttggcgacgatcatgccggccggtggcggggtgttggatggctgggtgagccagacacggcccgtggcgtgttcggtgaggtgttcggtcggcccgtcgtagcggatgcggccttggcgcaggacgaacacgtatgggcaagtctgggcgatgtcgtcgaggatgtgggtggacaggatcacggtgcggtcgccgccgaggctggcgagcagcgtgcggaagcgcatgcgttcctcggggtcgagtccggcggtgggttcgtccacgatgatgagccgggggtcgcccatgagggcctgggcgatgccgacgcggcggcgcatgcctccggagaagccgccgatgcgccggtcggccacgtccgtgagcccgacccgttcgatgagctcgtgcgcctggcgcatgcgctttcgcgtgtcgtcgatgcctttgaggacgcccacgtagtcgaggaattcgagcggggtgagctgcgggtagggttcgatgtcctgcggcaggtagccgagcgtgcgtttgagcgcacggcgggtcctctcgtccttcagatcgtggccgtccatgagtacctggcccgatgtggggcggatgatgccggcgaggatgcgcatgagcgtggtcttgcctgcgccgttcggcccgatcagaccgaccatgccgtgcggcaggtcgcaggtcacgtcgtccagcgcgcggggcttcctcaggaagtccttggtcaggtggttgatggagatgaacatgacgtcttctttccgtgtgatgttttttcggtgggggttccgccggtgccgttcagcgcgttgtgcgcgggtgtgccgagcaccatccacccaacgccatgagcagcatggcgacggcgagctgcgcgatcagggatatggccgcgttggcgggcgtgccggtgaccgcgaggatgcctcccgtggccgggtagacggggccgagcccgaaccatccggcgccgacggcgtcgccgatca

SEQ ID NO: 2944 - DNA, 21205 bp, Unknown
  R19_24m  MAG No. k141_4971
cagcaggccatcgtctcgctcaagggcgaggtcggcgcacttgccaccgccttggccggcaagatcctcggtgccaagctggaagacagcgacgtgcagtcctcgatgatcgattcgatgatcgacgacctgggcgccaagaagtgaccgtgaccatccgtaaccagaaagggaggtgaccatgcgaggagaggcatcacgtattgcagaccgcgagtcgcgtgattcgctggccccgaaactgcgcgacacccgtgaggacgcgtggcggatcggcaacgaactgttcacgatcaccaaggtgctcgatgacagcattcagctggaacgcgcactgaccgacccgtcccgcccggtcgccgacaaggtggccgtcctgaagggactgctcggtgacaacgcgcatcctatgaccatggagatcatgaccgacttggtctcccgccgttggagccgtgcgcgcgacatcgccaacgcggtggaggacttcggcgtggacgccatgatgtactacgctgacgccaccgacgccacgctgcaggtatccatcgagctgtccgagctgcattccgcactgctgaacctgccggtcgtccgctccaagctgtacgactgccaggccaccagcgagggccgtgtgaagctgttccgcgaggtgttctccggcaagaccctgaacaaggtcaccatgaggctcgccgaacacgccacctgcaacctgcgccgccgccgctacttggagaccatccagtggctgatcaacaagttctcccgccacatgggcgagtcgatggtcaccgtgaccaccgccaccccgctgaagaaggagcagattgagcgactggtcgaggtctactccgccaaggtgggccgccaggtgcacatcaactcggtggtcgatccgaccgtactgggtggcatgcgcattcaggtgggcgacgaagtcacggacaacaccgtggtcgcacagctgcagaacctgcatcgcaaggtgcagacggaggcgactccggcctgaccggccgagccaatccgtccaacaccacacacaagcaaagacttgactgaacaataaccaatagaaggagtgatcatggcagaactgaccatcgatcccgcctcgattcgcaaggccctcgacgacttcgtgtcgtcgtacaagccgagcgacacccccacccaggaagtgggctatgtcgccacggccggtgacggcattgcgcacgtgacgggattgcctggttgcatggccaatgagctgctgacgttcgaagacggcacgctcggcctggcgttcaaccttgacgcccgtgagatcggcgtggtggtcctcggcgatttcgcaggaattgaggaaggccaggaagtgcgacgcaccggcgaagtgctctccgtgcccgtcggcgacggctatctcggccgtgtcgtggacccgctgggcaagccgatcgacggcctcggcgagatccagggcattgagggtcgtcgtatcctcgaagcccaggcccccgacgtgatgcaccgccacccggtcgacgagccgctgtccaccggcctcaaggccatcgacgcgatgaccccgatcggccgcggccagcgccagctcatcatcggcgaccgccagaccggtaagaccgccatcgcgatcgataccatcatcaaccagaaggccaactgggaatccggcgacccgaagaagcaggtccgctgcatctacgtggccatcggccagaagggctccaccatcgcctcggtgaagcagagcctggaagacgccggcgccatggagtacaccaccatcgtggcctccccggcagccgattccgctggcttcaagtacatcgccccgtacaccggctcggccatcggccagcactggatgtacaacggcaagcatgtgctcatcgtcttcgatgacttgtccaagcaggcagaggcctatcgttcgatttccctgctgctgcgccgcccgccggggcgtgaagcctacccgggtgatgtgttctacctgcactcccgcctgctcgaacgttgcgccaaggtctccgatgacctgggcggcggttcgatgacgggtctgccgatcgtcgagaccaaggcgaacgatgtgtccgcctacatcccgaccaacgtgatctccatcactgacggccagatcttcctgcagtccgatctgttcaacgccaaccagcgccccgccgtggacgtcggtatctccgtctctcgagtcggtggcgccgcacagaccaaggctctgaagaaggtctccggtacgctgaagatctccctggcacagtaccgttcgctggaatccttcgccatgttcgcctccgatctggatgcggcttccaaggcccagctgacccgtggtgcccacctgaccgagctgttgaagcagccgcagttccacccgtactcgccggaacaggaagtcgtgtccgtatggaccggcacccacggcaagctcgacgacctcgacctgaaggacgtccttccgttcgagcagggactgctggactacatcgaccacaacaccgatatcctcaagaccattcgcgagaccgaggaattcaccgccgacaccgaggctgccctcgataaggccgtggacgagttccgttcgacgttcgtctcttccgccggcaagccgctggtcgagaagaagccggacgttgacaaggccgcgccggttgatcaggaaaagatcgtggcgggagaaaagtaagccatgggctcgcaactcgcattgaaatcacgcatccactccaccgagtcgttggcgaagatcttcaacgctcaggagatgatcgcgtcttcgcatatcgccaaggcccgtgatgtggccctgaacgcgaagccgtacaccgatgcgattttcgatgccgtgcaagcgttggtggcccacacccatatcacgcatccgatcgcggtgaaggacgagaagaacccgcgcgtggctgttctcgccctcacctcggatcgtggtatggccggcccgtacacctcttcgattatccgtgaaacggagtcgctgctgtcccgcctcgatgcggcaggcaagcagccggagctgttcgtgtacgggcgtcgcggttcgacgtactacaagtaccgtaatcgtgacatcgcggcgacgtgggaaggcgacaccgaccagcccggcgtggaaattgctgaaacgatctccaacactttgatggacgcctacatgaagccggctgagaaaggtggagtttccgaactctacatcgtctacaccgagttcatcaacatggtggtgcaaaaggtgcgcgtgctgcgcatgctgccggtcgaaatcgtgaaaaacgagaccaaggtgcccgatcctgatgaagaggcaccggctactgcggatgtcgctccgctgtacactttcgagcccagcctcgaaaaggtactggacgcgattctgccgaagtacattcagtcccgcatccacgagtgcctgctgaccgcggccgcgtcggaaaccgcaagccgccagaacgccatgcacacggcaaccgacaacgcacgaaacctgatcgacgaccttacgcgcaagctcaacgcttcccgccaggcctcgatcacccaggaacttaccgaaatcatcggcagcgctgacgcgctgaccaagaaggaagagtaggaacgcatatggctgacaaccagaccactgcggccgagcctaccaacggtcgcgtcacccgcgtccagggctcggttatcgacgttgaattcccggtgggtcatctgcccgacatctacaacgccctgaaagtaacgatcgtcaacaccggcgccaaggaagaaggcgaggcgaaggagaccgagatcaccctcgaggtcgaacagcacctcggtgattccacggtccgttgcgtcgctctgaagcccaccgacggcctggtccgtggtgcctccgtctccgacaccggcgccccgatctccgtgccggtcggcgacgtgaccaagggccacgtcttcgacgtgtccggtaacatcctcaacaagaagccggatgagaccatcaccgtctccgagcgttggcctatccaccgcaacccgccggccttcgatcagctggagtccaagacccagatgttcgaaacgggcatcaaggtcatcgacctgctgaccccgtacgtgcagggcggcaagatcggtctgttcggtggtgcaggtgtgggcaagaccgtgctgattcaggaaatgattcagcgcgtggctcagaaccacggtggcgtgtccgtgttcgcgggcgtcggcgagcgtacccgtgagggtaacgatctgatcggcgaaatggccgaggccggcgtgcttgagaagaccgcactggtcttcggccagatggatgagcagccgggtacccgtctgcgtgtcccgctgaccgcactgaccatggcagagtacttccgtgacgtgcagaaccaggacgtgctgctgttcatcgacaacatcttccgcttcacccaggccggttccgaggtgtccaccctgctgggtcgtatgccttccgccgtgggttaccagccgaacctggccgatgagatgggttccctccaggagcgcatcacctcgacccgtggtcactcgatcacctcgctgcaggccatctacgtgccggccgatgattacaccgacccggccccggccacgaccttcgcccacttggatgcaaccaccgagctgtctcgtgacattgcctccaagggtatctacccggctgtggacccgctgagctccacctcgcgaatcctcgatccgcgttacgtgggccaggctcactacgactgcgccaaccgcatcaaggcgattctgcagcgtaacaaggagctgcaggacatcatcgccttgatcggtatcgacgagctcggcgaagaggacaagaccaccgtgaaccgcgctcgtaagatcgagcagttcctcggccagaacttctacgttgccgagaagttcaccggtcgccccggctcctacgtgccggccgacgagaccatcgaagccttcacccgcatctgcgacggcgtgtacgacgacgtcccggagcaggcgttctccggtatcggcggcatcgatgatctcgaagagaagtggcacaacatgcagaaggaactgggtgcgtgatggctgcggaaaaaaccacgatgaaggtcaacatcgtcgccgctgaccaccctgtgtggcacggcgaggcgacgagcgtgaccattcccgcctctgagggcggcatgggcatcctgcccgaccatgagcctgtgctcacggtgatcaagcagggtacgctcaccgtggttgagcccgatggcgatcgccacatgttcgaggtgaccgacggattcatctccttcgactcgaacaaactcaccgtggcggtcgagcgcggccacgacgtccagtactccggcaccgccgagtgatctgaaccaactcctcaaggggctctctggttttccagagagccccttttgctatgtatgccatgtgttgcgctacagtggtggcctatgcgagttattgttgccgactgttcggccgagtattcgggccgcctcaacgcctcactgcccctggccaagcgtgtattgctgatcaaggctgattccagcctgttgattttctccgaattgggctcctacaagccgctgaactggatgaccgcgccctgcacgattcgtgagatcgacccagccgccaaatccgcgcaacattcccgggaaagtgtcgctggtggggctgtggatggtgattccgcgacgcattccccggaaagtgtcgccgctggtgagccggaaaaggtgctacgtgtcagcgccgacaagggctctgacattcttgaagtgacgctgcaacacatctattccgaccaaacctatgatctgggcgaagatccgggtctcatcaaggatggcgtggaagaccatctgcaacgctatctggccgagcagatcgagcgtatcggcaagggagccaagctggtgcgtcgcgaataccctaccgccattggtccggtggatatcatggccgtgaatgccgagggcgagcatgtggctgtggaaatcaaacgtcacggcggcattgatggcgtcgagcagctgactcgctactgcgaactgctcaatcgcgatccgctgctggccccggtgcatggcatcttcgccgcacaaaccatcacgccgcaagcccaggtcttggccaaggaccgcggcttcacctgcctcatcctcgattacgacgatatgaaaggcaccgaggacgacagtctcaggctgttctgattgttcttggcttccctcttgaaggggagttttcgaacgtacatagagagactgaggggaggcctcacggtatattccgtgaggcctcccctcagtcagtttcgctgccagctcccctcttggggagagccatcgagattgtttagtacgcggcgagaatatcgattacgaagaccaacgtggagttggcgggaatcgaaccttgctccttatctccataggcctgatccggcggaatcaccagcagaacctgagagccgacggtctggccgaccagacccttctgccagccctcgataacctgatgctggccgctggaatcgctgaacagatcggcgtcgattgtggaatcgcgatcccaggacgaatcgaactgcttgccatccgtaagccaaccggtgtacttgaccaccacggtgttcttgtcggtcagcttggcgccgttacccttgatcagcgtctgcgagatcagcgaatcaaccgaaccctgaccgttcatgtcaatggacggcttgccattcttggctcgcgtcaccttcggcagattggccggcacatccttgacttcctcgccagtggccttcttcaggtccttggacttggatacaaacgtcatcgccaaaatgtaagagtatccggacgaatcctgagcgttgacgccaaagccgatcgtggtgttgatcttggcacccttgatctggttgtagtaggtcgaggagagggtcttggaatccaccttcagcgagcaatccggcgtgttcttggtccaggtgtccatgagctcggtgccgtctttaacgttgagcgcgatgccttgggcgcagacgcggtcgccctcctcgattacgtcgccatcgcccttttgcagcaccacataggagccgtcggacacggtcatcggcgtattaaaggagatggtcggcttctcgccgagcttgcccttggcggtcacgccggcaatttgccccttcttgtcagaagagtcggaagaggatttcgagtccgagctcgaactggagcaggcagccagcgatacgcacatcgccagcgagcaggcaagagcaacggccttgccgagaggggataacatagatttaacagacttacgcatgacacaccaccctactggtgaaccttgattttctgcgctcctaggtaataaacaggtgaagattgtagaatggttaagttatgagtgctgaagaacagactacaagaccggataagggcgccaagcgtccatcccgtcatgccaagatcatgcgtggagtggtgacgcctatcttcggtctattggccgtggcggctgtggtgttggggtacatgaatgccacgatatggaagccctccactgaaatcaccgcttccgcaaccatgagcggctcccggtatgccgtcactgatccgaatgtgctgaccttgttggatcagaacgccacgataaccgtggactcgggatcctctcaggacgaggcgtgcgtggcgttgggtccgtccaaggatgttgccggatgggtcgcgtccgagaagtcctatacccgtatcaccggattggcgtcatggagcgagctgagcacccagaagggaagcagcacgagtcagggagcgcctgccagtgccgatgacgcggtggcgttcaaggattccgatatgtggactgccgtgaaatgcggcaccgggtccgtttcgctggagagcaagaagaccggcgcctcgacggtggccattgtggatttgggtgaaaatgccaccaacgccaaggtgcagctgcactgggtgcgctccgaagtgccggactttgcgatgccgttctatctgtccggtggattgctggccgtgctggccgtattgtgcgcctccgtgttcgccatgccgccgcataagcgccgcaagcgcatggtggaaggcacggcaagcgccgtaattgaggaagaggcacccgccagcatcgcagtgtccgggaagccggatggtgcaagtcgacgtaatcgtcgccgccacgccacaaatcggcgttcgggccgtgcgtcctcgcaatctgaagccaccgaaacaccggttatcatcgacccaagttcacgtaacctggtcgccgaccagcagactggtgccgagagcggcgctgagaccggcttcagcgccggcgataacgaatcgacttcggtaatcacccctgacgaactgcaggcctacttctcccgcttggcccaagaggtcaataccggagacgactcggccgatgacggacaggaggaaagctgatgaacaagcgatggaacaaactgtgtgtggccgccctcgcctgcgtggcgttggtcgtgccgttgaccgcctgtgaaggccggctgccgacgccggctgctgatacctccaccaaggttgcgccggatttgaccgaggcacaggagaagaagattcgcctgaagattctcaagacgatcgatgaagccgatcaggccaagaatcccgatggatatgcggccgttatgggcgggccccagctggacattcgcatcagccagaccacgatcaaccagcgcggcggcggtatgtccaaatacgcgaccattcccaaggacatcgcccagacggtgattcccatggacgacggatggcctcgctcggtgttcaccatcacgaccaccaccgaagatcagcagtccaagcgtttgctggtcttcgatcaggaatccgcccggcagaattacaagctgatggccatggctcgactgtttgagggggccaagctgccgaagttcgagattccgactattggctcgcagatgggcactgcaaaggatgagaagctggtggccactcccgccgatgccttgacccaatacgccgatgtgctgcagaacggctccaagagccaatacgcttccaagttcgcagacgatctgctgcgccaggaactggccaataccacggccaaggtgcaggaaggtatgcaacgcaacaacggtacgcaggagcagaaattcaccgttgtgcctgaacagatgtgggtgatgcgtgctgcagacggtgccggtgatttggtggttggccgtattaacggcgaatggactcgcaaggcgggggatggccgcgaatcgcagccggcttccgacgacgagaaggcgctgttcaatagcgacaagtacaccagcaccatgaaggtcacgtatgtgaacgtggtggccttgtacattccgttggcaagctccggtgagcaaatcaccgccgtgggtgccgaccgtcagccggtaaaggtcgaagcgctgtagttgttgccgccgcccaccgcgcggttaacgccccaccacgatatgattcatccaccacgatgtcggtaagttttacctttcgcacaatggtgccgttttgagtcacatcgtggtgggcgttttgctacgtggtgggaatttcaccgcgtagtggaagaatccctacgtggtgggaatcggcattacaatcaatgtcagcaaatgtgattgttgttgtacgcgaatcgcgtggaatcgggaggcattatggcagagcagcagttcaatccgggagtctcattggcgggcgccgtcgatttggaggcgctgaagcatcaggtcaaggccgagcccggccaggcgggtggcgctcctgccgctggtgggtacgtgatcgacaccaccgaaaacaccttccaggcaatggtgcagacttctgcgaccttcccgatcctgctgctcctgtggataccgaccgatgaccgcctgttcccgatggcccgtgcgttgggcgacgcggtgaacgccctgaacggccagattcagctctcccgtatcgatatctcgtccaatccttcgattgcccaagcgttgcaggtgcagggcgcgcccgcactgttcgcgttgattgccggccgtccgatgccactgttgcagggccttccgggtgacgacgagctcaagcaacttaccgacgaggtgattccgaagatcattcaggccgccgcgcagtctggtgtgaacggtaccgcgccgtactcgggtgatcctgattccgatgccgccaagagcgctggtgccaccggtgccggcgcgggtgctgagcaggtgccgccggagcatgccgaagcccatcgtttggccgaggagggcgattacgccggtgccgccgccgaatacgagcgcgtgctcgaatccgacccgtccgatgcactggccgcccgcgaacgtgcgaaggcgctgttgctggcccgctccgggtccgctgatgtacgtgacgtgcgtgccgctgccgccgcagcgccggacgatgtggaagcgcagttggctgtggctgatatcgacatgatcggtggccagattcaagacgctttcgaccgtttgctggactttttggccgccgggcacaaggccgatatcgagccggttcgcaagcgtctgctcgaatacttcgccatccccgaacccaccgacccgcgtctggctcgcgcccgccgtcgcctagccaccctcatgtactgattggttttggctcccctctttgaggggagctgtcaggcgtagatgactgagggaagcgcgcgaacgtacttgattgcttcccctaaaccatccgattcttcccgaaatattgctggaaccttggcccctccagcgccagttcctcctcgaaatcatccgcccacttgcagaacggacggttggcgagaccatcgttattgaatcgcgcctgatcggtgatttcggtgatgcagaatttcggaatcgtcagattggtaaccggcccggatcgttcggcctcggctacgatcagcggcgcgttcggcccgccgaacacgtccacgctccagccgtcttccgcaatccacacggaataccggttcttgatgattaccgagccgccgcgcttgatgagttcggcggcgatgcgcgtgtcgatctcgcgctcgacctcgtagcgcgtgccacccacggacggacctttgacggtgacatacgcttccgagaaccggtcgcggtactcgtccagcacggccaccggatttacgtcgggcgtcatgtcgacgtgaaccttgtgcgagaccagccgcacgcgcaaggcgtaattgtcggcatgcacgtagtagctctgaataatgagggtcggggcgtcgccgtcgtcgtattccgccggcagctcgcggcagaagaagcggcgttcgtattcgaagtcatctgtaggttccgacataaccccattgtagagccgatgatggcgattttctcgttattttggcgacgtatgtgcctcatgcagcgtgatgtggtgtacagtaaagaagttgctcgggtttgtagctcagtggatagagcgtctgtctccggaacagaaggtcgtgggttcgatccccatcaagcccaccagcatggctttcggctagccgccggaagccttttgcatattcggcgcgtgatattaagcgcgtgcaaagctggtgctggtgctggtgctagtgctggtgctggtgctggtgtcggggtcggtgatgccggctcgcttgggtcgtggaaaaaccgcccggtttggcgagaacggtagtcgaatcgtctggaatcgtctggaatagcaaggaatagtctgttgatggccgtatgccgggcatcatgcgcgctaaacgcgacttcgctcagtagactgctacgtaatcggcattgccaatcgttgctgatcgtgcgattggtcgtagccggtggtgatgtgtaccggcgccggccgcagcaggtgggcgcccccaagatgagaaggagcacaatatgagcgaaaagatggaagccgtagccacttccgaggcgccggccgcgctgggcgcatacagccaggcggtgaaggccaatggcttcgtgttcgtatccggccagctgggcattgatccggccaccggcgaactggcgggcgagaccgctggagagcaggctgcacaggcgctgaagaatattaagcacattctcgacactgccggtaccggcattgagcatgtgtgccgcgccaccatctacctgaagaacgtcgaggacttcaaggaagtggacgcacgttacgctgaggcgttcatcggctccgtcaagcccgcccgcgtggcctttggcaacaacatgattcccaagggcgcgctcgtggagatcgacgccatcgcggtggagtgattcgaacgtttccccggcggcccgtctgcgcgcatggtgtgtgcagacgggccgccgcgtattgtgcgacgcattccggggaatgtcgcgctaggcggggtgcgaggtgtggttccgcggcacattcccgggaatgttgcgctggaatcgttgggcggtggtccgtgccacaatagagaccatggcatccaaaggaaaaccgtcgccgcgttcggccgtaagcccgctgagtgatgagcaggtcaagcgtctggccgcccgccacacgcttgtggactcgacacagtattacccgaccggccctcgcacgcccaatcagccggaaatcgacgcccagaatcccaaggccaccaaacgactgctgggaggggtgtccattgtgttccgcgccagctgcaagaccaaggcctggggcctggaacaggtgccggaaaccggaccgttcatcaccgccgccagtcatatcaccatgttcgatgtgttcgtgccgatgatgagcctgttccacatgggccgccgcccccggtacatggccaaggccgagatggcgaagtggccattgatcggcaagtggttccggttggtcggcatgcagccggtgcagcgtcattcgggcaaggccaagcagatcgaagagacctcgattgatattctgacgtccggccgcccgctgacggtctggccggaaggcaccgtgacccgcgacccgaaaaagtgggtgatgagcattaaggagggcgtgggatacatcgcccttgaatcctcgcgcagactggggcatcaggtgccgctgtacccggcggtgacgtggggtgccgcctccatcaaccactggtggccatggccgcgcaaaaacgtggtgatgtgctatgaccatgcgctcgattactccgatctgcttgccgacatggactcatggggtgaagaaccgcctgccgaggccgtgaacgagctgatgtggcgcgtgctcaaacgcatgaacacagtactggaggaaattcgtggcgagcagttccccgctgaaggctactgggactaccgcagcatgagtcgcaagccttggccggaagccggcggcccgttcccggctgagaagtagccgcaccggttcccgtacggggagcctaggcgagtagcatggcacaagattgtgccgatgaagttgcgcgacaagcgaaggtaggaatctgatatgggtaaaaatataacggttctcggcgcaggagcatggggtactgctttcggccaagtgctggcggacgccggcaacacggtgaccatgtgggccaaggagcagcggattgtcgagggcattcgcgatcaccaccacaacgccgtgcgcctgccgtccgtcgaaaagttgccggacaacatgaccgccaccggggatcgcgccgaagccgtcaagaacgcggacatcgtggttgtggccatcgccgcgcagttcgcgcgagtggcactcgtcgaattcaagggactgattcccgatcacgccatcgtcgtcagcctgatgaagggcatcgagcgtggcaccaacaagcgtatggacgaagtcgtccgcgaatcccttgacctgccggccgaccggttcgccgccatttccggaccgaacctgtccaaggaaatcgccgatcgtcatcctgccgccaccgtggtggcttgtacgaacctcgataatgccacgaaggtggccgaggcatgtaccacctcctatttcaagccgttcgtgaccaccgacgtcatcggcctggaaatgtgcggcagcctgaagaacgtgaccgcgctggccgtgggcatggcccgtggtgccggctacggtgagaacaccgcagccatgatcgaaactcgtggactggccgaactgaccgcgctgggcgcagccgctggcgccgatcccaagaccttcttcggcttggccggtgtgggtgatctcatcgccacctgtggctctccgctgtctcgtaactatacgttcggcgcgaatctcggcaagggattgacggtcgaggaggccaccaaggtcagcaacggggtggccgaaggcgtgcccaccacggatgcggtggtggctcttggcgagcagcttgatgtgccgaccccgttggcgtatcagatgagccgcgtgctgaacgaaggcatttcctgctcggagatgcttgccggactgttcgggcacgaggttaccggcgaataacgagagaagcgacgtatacgtggcgtatacgttgtacgtgcaaagtcgtgtggcgtatacgtcgttgacgtgcgcgagtagactggtgtgcgtctcttgtgcgcggcggtccgagcgcggttcggtccggttggcggtgcaaagcataggcttgaaaacggttgtagtttcaataaaaggatggttatggccaagaagcgtgttgtggtgctctatggtgggcgtgcagacgagcattcgatttcctgcatctccactgccggtgtgctgggggccatggacactgaacggttcgagccgattccggtcggcatcaccaaggacggcaagtggatcatcaacggcgaagatcctcgtggctggaatctggatggcggcgagctgccgaccgtaaagatcaccccggaatcgcgcccggtgatgcttgacccctctcgcggccaggacggtttcttcatcggcgagcccagccgcatcaattccgccgattccggcttcggcaccagcttcgtcagcatgtccgacccggaaatgcaccatgcgctgacctcccttggccatgtggacgcggtactgccggtgctgcacggcccctatggcgaggacggcacggttcaaggcctgctggaaatgatgggtgtgccgtacgtggggtgcggagtgtttgcttccgccgcctgcatggataagcattacaccaaggtggtgctgggtgccgccggcattcccaccgcgccgggtgtgacggtcgatgcgcgcaacttcaccgccgccgatgtgcttgccaagatcgaggacgccggtcttacctatccgctgttcatcaagccttcgcgcgcaggctccagcttcggtgtgaccaaggtcgagaaagccgatgaccgcgagacccagcaggatcgtctggccgccgccattgccaccgccggcgagcacgattggaaggtgctcgccgaacaggggattgatggtcgcgaaatcgaatgtgccgtgctgtgcccgaaggccggtgacgagcccgaggccagctggcccggcgaaatcgtgctcgatcatcagaacgacgaccagttctacgatttcgactccaagtacatggatgcctccgccagccacgtggaagtgccggccaatctgccggtcagcgtgcttgaggacgtgcgtgacgtggcccggcgtgcgttcaaggccgtggatggtgccggcttgagccgtgtggacaccttcgtgacgcctgatggcacggtgatggtcaacgaaatcaacaccatgcccggcttcacgccgatttctatgtatcccaaggcttgggatgccaccggagtgagctacaccgaactcatcacgcgattgattgagggcgtgctgaggtaagtgtggtgcggaatcggctgccaaggaagaaggcgcgctgaacgtcatcgccttgccgcatgattggtccaactacggcgaggtcatcgagggcttcaagaagaagtacccggagatcaagatcaccgagctgaacccgaacgcctcctccaaggaggagatcgacgccgccaagaccaacaagggtaccgacgccgcccccgatgtcttcgacgtcggccaggccatcgccgccacctccaccgactatttcgccccgtacaaggtgcaggcctggaacaagatccctgatgctgccaagaacgtcgacggcgcctactacgccgactacaccggcatcatgtccgtgggctggaacgccgacaagtacggcgatgtcgcctccctgaacgacctgctcgatccgaagttcgccggcaccgtgtccctgaacggcaagcctaccgaggccggcgcggccttcaacggctatctgatggtcaaccagctcgccggcggcgacatcaacaacctgcagcccggtctcgacttcttcaagaagctcaaggaagccggcaacctgaacaccatcgatgtgaccaacggcaccatcgactccggccagaccggcgtggtcttcgactggacctacaaccaggcctcctacaagaaggaactcaagtccaagggcgtgaactggaagtacaagaccttccccaaagcccaggtcgtcagctactacaaccaggccatcaacaaggacgcgccgcaccccgccgccgcacgcctgtgggaggaatacctgtacaccgccgaaacccagaacctgtggttcaagggcggcgccaacccggtgctgctcgactccatgaaggccgacggcaccgtcgactaggccaccctgaaggacgccatcaccatcgaaggccagccggtcacctacagcaacgatgactccacccgcatcaccgagtggcttcaaaacaactgggacaagacgatcggcaactgagagtccacgatgaccgccgcaatcgcacccatcgcaccgaacggacccgccgcctccaaggccgcgggtccgtccgccgcatcgacccccgcttcgtccgcactggcgaagcaccgtcaggagcttggcacgctcaccaccacgctcccgttcttcgcctacaccgcctgcttcctgctcgcacccaccgtgatcgtgatcatcggcgcgttccaggatcgcagcggcggtttcacgcttgcgaacttccacaagatgttcgaagccaacaccatcgccgcgttcggcacgtcaatcctggtgtccgtggcctcatccctgatcggtgccgtggtgggcgcgctcgcctcctacgcgctggtgatcggcgccaagccgaacggaccgctgcgccgtatggtcgccgccatctcatcggtgctcgcccagttcggcggcgtgatgctcgcgttcgcgttcatcgccactcttggcatcaacggcatcggcaccatgctcatcaaaaccctgactggctataccgtgaacccgaattggctcagctccctgccggggctggtgaccgtctactgctacttccagattccgctgatgatcatcatcttcctgcctgcggtcgattccattcgtccacagtggcgcgaagcctgcgagtcgctcggcggcaacaccgtccaatactggacgcgcgtggcctgcccgatcctcgcaccccgcttcatctcggcgttcctgctgttgttcgcctccgcgttctccgcctatgcgaccgccgccgccctgttctcccagcgttcgatcctggtgccgctcatgatccagggtgccatgcgcaatgagatggaccccaaccagcagggcttcgcgcaggtgctggcattcgcaatgatcatcgtcgtggccatcgtcatgctgctgagccacgccgtggaaaagagggccggacgttggcaatgaccgaaacttccacaaccaagccgccgcagctgcgtgccgcccgcgtgcgcaaacagagcatcatcaaattcgtgatcctgttcgtcaccctggcgttcctgttcgtgccgctgctggccatgttcatcttcaccctgcgtcacccgttgtccggtcgctggtcggccgcgccgtggacggcgattttcaccggcaacggcgaatcgttgggcgccgatctgagcgtgctatggcagggcgtcggcatctcgctgtcgttgagcgccgtcaccgtcgtgatcatgctcatcctgctggtgcccaccatggtcatcgtgcatattcgctccaaagccttggagcgtgcaatcgaatgggtggccacgctgccgctgaccattccggtcatcgtgctggtggtgggtcttgggccgatctaccgttggctttccgccgacgtgttgagcaccaacccgatctggctgtgcttcgcctatgtgattctcgtgatgccgttcgccttccgcgcgatcgccgtgggcctcaactccatcgacgtcaagacgttggtcgaagcctcccgatcgctcggcgcctcctggcccaaagtgttcttcaaggtgatcatcccgaacctgtggcagtcgatcctctcggcatccttcatctccatcgccgtggtactcggtgaatacaccgtcgcctcgctgctcggccgtatgaacctgcaggtcgcgctctaccagctcggccaatccaatgcccaaatttccaccgccatgtcgctgctggctctgctcttcggcgtggtgctcctcgttgcgctcgacctgatctccgacgcaatgcgtaagtcaagggaaggtaagtgacccgatgaacaacgattcaactcccacccgtcaggaaaccggtaccgcagtggacgccgccccggcgtccccggccattccggcagccgtgtcctccactgccgaggacgccttcaagaacgatcccaccgctaccctcgagggcgtgcgcggcaaggacgtgaccaaggccgccaaggccctgctcaaagacaccgccaagcgcggcggtggttccattcagatgcagaacgtcgtcaagatctatcccggctccaccgttcacgcgctcgacgacttcaacctggacatcaagcccggcgaaatggtcgtgctgctcggtggatccggttgcggcaagtccaccgcgctgcgatcgcttgccggtctcgaagacatccaaggcggacgcatcatggtcggcggacaggatgtcaccggtgtgccggtgaacaagcgcgagatggccatggtgttccaggcgtactcgctgttcccgcacatgaccgccctggagaacgtggaattcggcctcgaagtgcgcggcatgggcaaggccgaacgccgcaagatcgccatggaacagctggagctcgtggggcttgccgatcaggccaagaagtacacgcagcagatgtccggcggccagcagcagcgcgtggccctgtcccgggcgctggccatcaagccgcgcgtgctcctgctcgacgagccgttgtccgcgctcgacgccaaagtgcgcgtccagctgcgtgaccagattcgccgcatccaactcaccaccggcaccacaaccgtcttcgtgacccacgatcaggaagaggcgctggccgtggccgaccgcatcggcgtgatgaacaagggcaagatcgagcagatcgccgccccgcaggacctgtaccagcgccctgccaccgagtacgtggccacgttcattggactcaccaaccgcctgctcggcgcatccaatggcgacgaggccgtggtcttcggccagcgcgtgccgctgctcgccggctccgccaagggcgattccgtggccgtgctcgtgcgcccggagaacctgatgctggccttggctggcagcagcgattcgcacgtcggcgaacgcgcccgcgtggaggtcattcacttccttggctctttggttcgtgtggacacggtcatcacctccggcgaataccagcgctggaacaaaggtgaacagctcaaggccaccgtgcagctgcccgccagcgagctgccggccggtctggcggtgggcgatgacgtgattgtcgccccgcgtccggtcgccgcgctcgcctgctgaatggcgttgcgatgatcgtgcggttctgttctgttttgtgactgtacgatcgtcgaatggcttatcggcaatgatatgtgtgggacggcggcgatttttgggcgattatcgcgtgccgtcccacgccggtgtgggatggcatgaacgtcaaacgatgtacattcgtgccgtcccacagaatgtattgaggaatcgttgcaatgacgccatttcttcgtgcggcgtcatcagtcatatgtggagtggtgtgggccgccgcgaaaaaatcgggcaaaatcgcgtgccgtcccacaacaatcccgcagagtagaggactctctcggcatggggattgattgacgtagatcattccttgcccattgatgattttccccattcccaatgcaatcgaaacgccgtgccgtattcttgaagagtattgcacgtgtgatcggtccgtttgcggccagtgactatgggggataagtatgagcgaaccaatgccgtcggcgcagcagccgcaacaaaccccacgcgattggtggttcacggcccatcgccggttttcgacaatcggctcggcgctcgccattatgatggtgttctggatcgggctgaatattctggccactgaagcactacgaacgctgcttggcgccgatgtgcccgcttgggctgtgctgctcgcctcctccgggccgctgtatgtggtggccatgccgctgagtatgttggccttcactcgcgtaccggttattcgcacccggcagtaccccatgaaggcgggggagttcattcggattttcgtcatgtgcattccggtaatgttcttgggcaatatgatcggcaatatattgtctgccggagccactgatggtcaggccaccaatcgcatcaacgacgtgattcttggcagcgactggcgggtgaacgcattgttcataggcctgttggcaccggtttgcgaagaatggatttttcgcaaggagattatctcccgcctgcgccggtacggagaaaagaccgcaatcatgttctccgcattggcgttcgcgctattccatatgaacgtgttccagttcttctacgcctttggcctaggactgatgttcggatatgtatacacacgcac

SEQ ID NO: 2945 - DNA, 4250 bp, Unknown
  R19_24m  MAG No. k141_5379
ctacgagtccttctccactcccgaggaaatcaaggagcgcaaccttgccgccggccgtccggccgagttcggctacgatggctacgaccgcaacctgaccgatgaacagaaggccgccttccgcgccgagggccgcaagcctgcgctacgtatcaagatgcctgatgaagacatcgccttcgacgatctgattcgtggcaccatcgagttcaaggccggctccgtgccggactacgtgatcgtgcgcccgaacggcgacccgctgtacacgctgaccaacccggtcgacgacgcgatgatggaagtcaacgtcgtgctgcgtggcgaggacctgttgagttccacgccgcgccagatcgtgctttaccgttaccttatggaacttggcatcgccaaggagatgccgctgttcggccacatgccgtacgtgatgggacagggcaacaagaagctgtccaagcgcgacccggagtccaacctgttcaaccaccgcgacaacggcttcatccgcgagggcctgctcaactacctggccctgctcggctggtcgatcgcgccggatcgcgacgtgttctccatggacgagatggtcgagaagttcgatgtgcgtgacgtcaaggccaacccggcccgtttcgacatcgacaaggccatctccatcaacgccgagcacatccgtatgctcgagcccgaggacttcctgcgccgctcggtgccgtacctgcaccgcgatggtgtggtttccgccgacaactgggatgccctgaccgaccgtgagcgtgaggtgctgaccgccgccgccccgctggtccagccgcgcgtgcgcctgctgggcgaggtcgccggcatggtcggctccctgctgtccaccgaggagtatctggagcccgcggacgacgccaagaagcagctcaaggattccgccggcgaggtgctgaccgccgccatcgccgcacttgaggctgtggatgaagctgactggaagaccgacaacctgcatgagaccctgaacaaggccctggttgaagacggcggctacaagccgcgcctcgccttcggcccggtgcgtgtggccatgtccggccgccgcgtctccccgccgctgttcgagtccatggagatcgtcggcaagccgatcaccgtcgcccgtctcaagggcctgcgggcgcatctgtgatgcgtcgtccaccgcacgccggcggatgatgggagcgtgacgcatggcgggcatccgtacatacggatgcccgctttcgcgttgcatggggtgttcccgcagaacggcggaaaatggcgcgacacgccgggatttgcgtgagagcagggtagtgcgtaatatatctacctgttgcgcggttcgcctcgcagccggttgaaaaactgaatatgcccccatcgtctagcggtctaggactacgccctctcacggcgccaacaccggttcaaatccggttgggggtacgacgaacaactcttcggagttgctacgccaagccaaattggggtgtggtgtaattggcaacacagctgattctggttcagccattcttggttcgagtccaggcaccccagccaataaccctcgcggattagcgagggttttttgtttttacacgtcctgctcatgagatacggccgagagggtaatcctgaatagacaactctggggcaaagactgggctatagtcccaatccgtgactcaaaaacggcagaaatcccgcgtccgaacgtaaggggcgcgggatttctgccgtttcgggccgtgcaggaccggccgacatcgcgcgttgccgcgacttgagcgctgtccgatcctgaaaacgtgagggagaccgccctcgtcttacttcttgaccgcgttgacggcgtcaacagccttctgcagcgacgtggtgtgctcgtggtaccacgtgacctgctgttcgagtttcttggtcgcggcctggtagcccttggtgtcgtcggccacgcagccttcgtacgtcggcagttccacggtcagttccttggacagcgcgtcgagagcggaggcgtccgagacgtctgccttggtcagagcggcggcttctgcagcatcgccattgaccaagttgttgtagtcgttggtggcgttacgtacgtcttccgaggcggcggcgcaggcggccactgcactatcgtactgagacgcgctgtatgcgcgggtgccgaacaccgcgaccgcggcgataatcgccaccgccacgatggcaatcactatagcgacccacttcgtcactcgcttgttgtgcggctgtgccgtcgcttctgcttggttctgggattcgggctggttgccgttcgcctgctgtgcgtcagtcatatttacctctacttctcactgcccctgtttgtatcttgcggagggcctgtttcaaacaacgggtatccaacatatcgaggagagccgagattgccgggcgtttcctactggttgcgctgtggcgtggccgtttttgtctcatatggcgaaagtatgcgccagaggctattgccggccggtgacccacggcgcatccgaatggacgtgcggaatcatcatcgcgatgaccgccagcagacacccgagcatcaccatcaagatgatgttctcgtgtccgtgcgcctgcagaagcgcgccggtcagcgcgccagacgccagcgccagcattacgaccgcacgccgcccgagcttcgactgctggtggccgtgtgccgaagcgtctgcgacgacgccggtcagcgtcatcgtgagcacggtggtgggcaggtccggcaccgacagcttgcgggcggtggagttctggatgcccattgccggggcgagcagcacgatcagcaggatgatgtgcaggtcgatgtgccgtgcggtggggaagttcaggctcggctgtgaggcctgtgaggcctgggtggtctgtgcaagccgtgcaatcgaggagacgccggacgcatcgtctgcggggccggtgatgagctggttcaaaagatagacgccgattagcgcggcgagtacgaacgacgcctgcacgcaggtagaaaccaacagatgcttggcccggttctcctcgaatcgccggatgatgcgcccgccgataagcgcgccgaccatgaaggagacgagcgtcagcgccgacgtccaccagacgaagccttgggcatgggcgatcgaaaacccaagaaacacgatgttgccggtcacgttggccacgaacacatgccccagcgacaggtagctcagcgcgtccaccagcccggcgacgaacgtcagcaccaccaaggcgggggagagcagaccgtatctgtcttccttgcggggaaccaacgtgcgtcctgcttcggcaagatgtgatgtcatggttgcgacgaggctccttttcgggattgaaattatggcgagaacgtgcgtcggtcgacgccgccactctactccctactcccgtacggttcctccggtttccgctcgtgcgcagatcgtcgggacggagaagacgccggtgatgcagatcgatgtgccgaaatcccgcagcgtggtctcgaccaagtcgggcaaggtgttgcgacgccgtatgaaggtggatggtacgccggagagcgtgccgatgtacccgtacgagatcgccacgcgcctgtccgatttgggacgtttggacttttccgcgcagccggtgccggatgcgacccgtgatgatttcgatccccttgaacgcgaccgtctgcgccggattatcggcacctaccaatccagtgaccgtaatttgttggaactgaccgatgaggagctggagaaatccctgcaattgacggtgaccgtcgatggcaagaccatgccgacgctgaccggtttgctgctgctgggcaagggggagtctctgaaacgcttcgttccgactcatcgggcgtctttccaagtcatgtctggtacggatatcaaagtcaaccaagactatgccggaccattgctgaagaccatcgagcaaatcaacgacatgttctctccttggaatccaagcgtcgagctatccgtcggtctgttctcaatgatggtgccggaattcgaccatcgggcgttccgagaggcgctggtgaacgccttcggccatcgtgactacaccctgctgggacgtgtgcgcgtgcagttggatgatgcggggcttaccatcgccaatcccggcgggttcgtggagggcatcaacatccataatctgcttaccgccgaaccgcatggccgcaatccatgcctgatggatgc

SEQ ID NO: 2946 - DNA, 16437 bp, Unknown
  R19_24m  MAG No. k141_5620
ccaccaccccacaacacgcgatgtagccgccgattggtagggttggcagatagttaatcccctgtttgaaaaaggagctttggcttgtcggctgaactcgaagacattcatgaggaatgtggcatcttcggcgtatggggccaccccgacgcctcacgactcacctattttggcctgcacgcgctgcagcatcgcggtcaggaaggtgccggcatcgtctccaacgataacggtcatctcatcggtcatcgcggactcggcctgctcacccaggtgttcggcgatgagcgcgaaatcgaacgactgaagggcaattgcgccatcggccacgtgcgttacgcaacggccggctcgggcaccacggacaacatccagccgttcatcttccgcttccatgacggcgacgtggctctgtgccataacggcaacctgacgaactgcccgtcactgcgccgcaagcttgaagacgaaggcgccatcttccattcgaactccgacaccgaagtgctgatgcacttgattcgccgttcgatgcagcgcacctttatggacaagctcaaggaagcgctcaacacggtgcatggcggtttcgcctacctgctgatgaccgaagacgccatgatcggcgcactcgacccgaacggcttccgcccgctctccctcggcaagatgaagaacggcgcctacgtgctcgcctccgaaacctgcgcactggatgtcgtcggcgccgagctggtgcgcaacattcgcccgggcgaaatcgtggtggtcaacgatcacggctacaagatcgtgcagtacaccaacaacacgcagctggccatctgctcgatggaatacatctacttcgcacgcccggattccgatatctatggcgtcaacgtgcactccgcccgcaagcgcatgggcgcacgtctcgccgccgaatccccggtggaggccgatatggttatcggcgtgccgaactcctcattgtccgccgcatccggctatgcggaagcagcaggcctgcccaacgaaatgggcctaatcaaaaaccagtatgtggcccgcaccttcattcagcccacgcaggaactgcgcgagcagggtgtgcgtatgaagctctctgctgtgcgcagcgtggttaaaggcaagcgcgttatcgttatcgatgattccatcgtgcgcggcaccacgtccaagcgcatcgtgcagctgctcaaggaagccggcgccgctgaagtgcatatgcgcatcagctccccgccgctgaagtacccttgcttctatggcattgatatctccaccaccaaggaactcatcgcagccaagatgagcgtggaggaaatccgcgaatacatcggcgcggattccttggcctacctttcgctcgacggtctggtcgaatccatcggactgaacgccgacgccccatacggtggcctgtgcgtcgcctacttcaacggcgactaccccactgcgctcgacgactacgaggccgacttcctgaagtccctcacgcccgaggaccgtgtgcgtctgcctgaattcgcgctgtacaagagcaagtacatcggcaacgagtacaacaccgtgcagccggacgtgcagtaggttcggccggtccttcgactacacctcagtcattggtctttacgactacccctcagtcagcttcgctgacagctcccctgacaaggggagcttagtacaaacgaaaatccgctttttgcaggtggctccccggcaagggagcttgaaaatagaacagaaaggccccaccaaatgccaaaagcatatgagaacgccggcgtgagcgtcgaagccgggtacgaagtcgtcaagcgcatcaagtcgcacgtggcccgcacgaaccgtcccggcgtggtcggcggcatcggtggcttcggcggcctgttcgacctagcctccctgggctacaaggagccggtcctcatctccggcaccgacggcgtaggcaccaagctcatggtcgccaagctggccaacaagcacgacaccatcggcatcgactgcgtggccatgtgcgtcaacgacatcgccgcccagggtgccgagccgctgttcttccttgactacatcgcttgcggcaagaacgacccggccctgcttgagcaggtcgtggccggtgtggccgacggctgcgtgcaggccggttccgcactggtcggcggtgagaccgctgaaatgccgggcatgtacgacgaggacgagtacgatctggccggtttctcggtcggcgttgccgaaaagtccgccattgtggacggttccaccatcactgagggcgacgtgcttatcggtctgccttccaccggcgtgcactccaacggcttctccctggtgcgcaaggccctgttcgagcaggctggctataccgtggacactgagctcgccgagctgggcggcgcaaagctcggcgacgtgctgctcacccccaccaagatctacgtcaaggccctctccccgctgttcaaggcgggcgtggtcaagggcgtggcccacatcaccggtggtggcttcatcgagaacatcccgcgcatgattccggacggtctggccgccgagatcgagcttggcacctggcctgtgctcccgatcttcgacgtgcttgagaaggccggcaacatcgatcacaaggagatgtacaacatcttcaacatgggtatcggcatggtgctggccatcgaccccgcccgcaaggacgaggcgctgaagctgctcgccgacaacaacgaacccgcctacgtgctcggccagatcaccaccgacaccaccgacacgcaaatcgtactgaagtagctccagataccggctcccctcaaagaggggagccaaagactttaggaaggaaaaacatgggtcagaaagtattggtcatcggctccggtgcgcgtgagcataccattgcctacacgctgctcaaggcaccgagcattgacgaagtcaccgtggctcccggcaacccgggcatgctcaaggacggcatccacaccacgcagctgagccagtcgaaccacgccgcacttatcgaattcgtgaagaacaatggctatgactgggtgttcgtgggcccggaagtcccgctgatcgaaggcatcgtggacgatttcgccgccgccggcatcaaggcgttcggcccgtccaaggccgccgcccagatcgagggttccaaggatttcgccaagcagctcatggaccgtcacaacattccgaccgccaaatataagacgttcggagacttggacatggctcaggcttacgtacacgagcatggcgcgccgatcgtcatcaaggccgatggtctggccgccggcaagggcgtgaccgtggccatggacgagcacaccgcccagcgtgcgcttgaagacatcttcatcgatcatcgcttcggctccgccggtgccaaggtcgttatcgaggacttccttgacggccaggaattctccctgatgagcttcgtcaacggcactgatttctggccgatgccgatctcccaggatcacaagcgcgcccacgatggcgacgaaggcccgaacaccggtggcatgggtgcctacagcccggtgccgcagattccgcagtccgtggtcgacgaggccatcgagaaaatcgtgcgccccaccgtcgaaggcatggccgaggaaggcacgccgttcaccggcatcctgtacgccggcctgatcgccaccgccgacggaccgaaggtcatcgaattcaacgctcgtttcggcgacccggaaaccgaagtcgtgctcccgaagctcacctccgacctcggtgccggcatctccgccattctcgacggcgaaacccccgaattcatctgggatgagtccaacgccaccctcggcgtggtcatcgcctccaacggctacccggagaacgtcatcaagggtgcccgtgtgcccgagatcgaggtcgacgaggattcgcatgtctactatgccggcgtcgcctccgacgacaagggtggtctgattgccaactccggccgtgtcctgctcgtcgaaacctccgccccggacatcaagtccgctcaggacaaggtctacgcgatcatcgacaagctcgagctgcgcggactgttctaccgccacgacatcggcttcaaagccctgaagtaacagaagcggcgcatctgccgcatatttttgtcccggtggccatgtcaatcgattgacgtggctaccgggccagatttttctgtcccggtagctgatttcggctctttttcgcaaaccaggacagttgaacacctcgaatataggaatatttggaattcccttccatgcaaaaccgcactattccgccattttcgtaatacgcggacgatactttcggcgtcagttttgtcccggtaagcagaaaatgactcgaaatcaaataccaggacagaaaaatctggcccggtacacgaatcaatcgattgacgtggctgccgggacagcgaacgtcactatgacaacgccatcacccaatatcagcgagcgatatcacgctagctgaatttggcgatgatgttgaacagtttggccttggcttcattgaagggcgggtacacgaggcgcagagtgtcggggaactgcggcttggtaaccacggttttgacgtggctgaaggtgaggaagcctgctttaccgtggtaggcgtcgatgccggacgcgcccacgccaccgaacggcagtcggctggacagcaggtgacccaacggcaacgaatatcccaaagctccggagctggtctgacgttcgaaagtcagccgaacctcgtgatcgcgcgagaacacatatgcagccaacggccgggaccgcttgttgatgaatcggattgcggactcggcatcctcaaccaccaggatcggcagaatcgggccgaagatctcctccttcattaccggcgcatccggtgacgtgccgtatagcacggtaggcgcgatatatcgggcggcgcgatcgaccttgcctccgcaaacgattcgcccggccggatcgaatacgccgggcaccttgtgaatctcgctcggctcaacagcggccgaggcagtcgcatcactatcagcggctgccgtattcgaaccggccgccggcttcgccgcattgttcgcgctaccggtgccaccaccggctgtctcccccgcgcttccgcgtccggcagccacgacattgaagcgccgcccgaccatatccatggccgcgcctaccgccgatgccacctgtaccagcggcgagctcggctcctcagacggcacggtgccgaccggcaatagcttgcacagtcgttcaaaatgacgatcgttgataatacgaccaaaatcaggcgaggccttcggatcttcgccatagaattcggtgatggctacggcgatgcgctcggccagagcctcggccacatccggcgtggcgagcacatagtcgggtgccacgcaggtctgtccggcattggtgaacttgccccatgcgatacgtcgtgcggccacattgatatccaccgtacgatccacgaagcacggtgatttgccgccgagttccaacgtgaccggtgtcaggtgctcggccgccgcacgcatgacgattttgccgacgtgcccgccgccggtgtagaagatatggttgaacggacatttcagcagttcgccggtttccttgggcccgcctccgaccacgcacacggactcggggtcaagatattgcggcacgagttcggcgatgaggcgcgaggtgttgggcgaaagctcggagggcttcaggcagatggcgttgcctgcggcgagcgcgtcggccattggctccagagccaacagcaccgggtaattccatggcgagatgatgagtaccacgcccttgggctcggcgatcgtccagccggcggcgggttgcagcatccaatgcatcgccttgggatggcgcgcggcccacagtccgagccggttgcggacgaactgcgcctcgccagccaccagattcagctccatcagtatggtttccgccgcgggtttgcccaaatcggccatggccgcagccacgaaagcatcacgattgtccgctaccagacggcatagcgcatccaattgcgcccgtcgccaagccaatggccgcgtacacccggattcgtaggcgtgacgcaactgagcgaaatccgcattgaccatggcacatccttcccgcaggatgcccgggtcggtttccgggcatcgactgtacctatcgtaccgtcatgacgatggcatgagggcgtttgtgctgcaggcaataccagacgtttcggctggtattcgccaaatagcttgggctcggccgaagtaggtggtgcaggtattgtcggcgagttcatcgacggtgatgggattggcgctggccacgccgagcagttcggcattggcaggcaggtcgtgttgtgcggccacagagtccacttgtacctccacatccacagcttcggcagaaggtccgacggcgatatgcccgcctgcatcaaccacaatgcggcggtcatcggtgacatgcacgatggcgtcgcggccctcatagcccgcccatgaccagctggccacgccgtcatgtcctcgttcgatgaatcgcgaggtgcggcccgcgagggtcgcgcgactcgtgaatcatcgcatcgtgcgggagcgtgactggctgccgcgttgccgtatcgcggtccttgccaattgaacggaaccgccagccatgattcacatcgatgcgcttcatggctttattgtaaggcgggagtgattggtctgtgggatctctccctcagtctcacttcgttcgacagctccctcatcagagggagctcacagcactatggcaacggtacagcaatcttggacgggcttcgcccgcgttttgctggctcgcctgtcggctcgcacgttgcctacagaccgaaaatcctccggattttccgtcgcggcacagccgctcccctcacctacggatagcccactgagctatccgctttacggttcggccgggctgtctgctttacggcaacgtcataaaatctgtgtctttgaggtagtttttgccggcggtgatgtcgtattggatgagcttgtagtcggcaagcaactgcttggtttccttgtcgaagtcatcggtggacatcgggttgccgttttggtcgagatagatgttctggccttcgggaatacgatcccagccttggaccttgttgaccacaggcggttccatagcggcaatcttggaatgcatttcggtcaggaacgccagatacgggctgaccttggcgttcatgtgatcggcggcctgtgccacgaagaagttcggcgaagagtaggctgcatcgcttgccttattgccttgggagctggaagccttattcgaccagatgaagtaatcggtcaggtgcagggccaaggagttgttgccatcctcgctggcggacgagtagatgcccggcaagtgatcgccgtagaacactacggtgacgggcttatccagcgcatccagttcgttcaggaactcctgagtggcctgatcggtaatctccacacccttttgataggtctcaatcgactgctgttcatcatcacccagcggcgtacccgtggtggattcagcggtgtagtcgttgttctcataccactcgtggtagggcatgtggttctgcatggtgatgatctgaatgaacttgttcgtcttgccggacctgatgccttccagcgcagaatcataggaagacttatcagagacgtacggcgactcgtcaatcttgtcctgatacttgatcacgtccggaccggtcagcgtgtagaagtgcgagaacccgaacttcttgtagttcgtagcgcgcgagtacatgctggactcgtacggatggtagccgagcgagttggcgggcgcaccccacatctggttgatggtgggggtccaatgctggctcgggaccagctgctggtacgggctggacagggaggaatcgaaattggccatgctcagaccggaaagtcccatgtattcgaggttggccgtaccgccgccgtagccggaggagagcatcaggccggaggtggtgcccgccttgatcttgcggatgttgggcatcgaatccttattggtcttcagtcccggcacgcggctcgggtcggagaaggattcggacagcacgtacaccactgtcgaatcagtgaggttgttggtgcgggaggcgttgattgtctccgcttccttctggtagcgagcggcgaccttcttcatggtctcctcggagtagttgctcggcttgtccatgatcttcgggttgagctgacgggtaaaggccacgagcggaccgttgcgctgcgcgtcatacacggaatcccacatggatggcgtgtcccccaaggcgcgggagaacttgttggccagcgaatcggtggtgctcacatgaatgcagtacaacgagaacaccagaatcggcagcagcagcagaatcagacgggaggtgaggttcaggctcaggttgtccgtacggatcatgcgacctttgcgcccgtcgaagtggcgcagcaccagaatcagggcgagcagcgcggcgaacgcgccaagtgccacgaggatggtcacgtgcgcgccggccggaatgaaggtgagcatattgccggtgttcgagccaaggaagccgaggtcggcgggcagaatggcctcgtaacggatctcgaccttgaaatgttcgatggcggccacgatgattccgaccgcaagaatcacgatgcttgccgtccagaatctgttgaacagcatcagcaacatgaggtacagcaacgcgacaagtatcacgttgagtacgaatacgaaattgccgtcggtccacatcttgctcacgaagccgaatccgacggtcggactggacagttgcacacgggtggagctggacgaaacgcccacttcgagcgccgtcacaacaataatgtcgaagataacgaagagcacgccgtacgcccagccggggaagggcttgtgggggtgctggggcgtgacttcattggcttcggcctttttgacccaaagcttgaaatggggtttcactgtggtgatactactagtgttctcgctcattcgcctgtttccgtatgtgacttttcaagggcatattgttgccgctgaaccttggaaaatccatagttccactatttttcttaccgtttcctaactattcaccctaacgcaaagggtgcctcgggacatccccgaagcaccctgatatataaggagccttccctgatagcgaagcgttctgttctcccctaggcaacgcctcgctatctgacttgattattccccttattgctgttgcggattgccggctaccgccgcattacttcacggcggcggcgaactggtcgaccagtgcgctcatccagtcgagcaggttggtgtactgcttcggcatctgctcggtgagctccacgatcggcacgttgacgtccttggcggcaccggtgatctggtcggtggtggagttggcttcctggctgttgaagacgagcatcttgatggagccgcccttcagggtgtcctggaagtccttgatgtcggccggggtcggctcgctctcgttggcggaagcctgggcgtagcccttcggggtggcgtcggtcatcttgaggtcgtcggccaagtgccaggccacggattcggtggcggcgtacggcaggttctcggtcttggcggaagtctccttgatcttggactcaagctggtcttccttggcgtgccattctttgttgagcttggcgtagtcgtccttgtgactcgggtcggccttctggtaggcggcggtgatggcgtcggcagcgttggaacgcaccttggcggagaaccagacgtgcgggttgtcgccttccttgatgccggcggtttcggcggcggtgaccagcgtggccttggtcgactgggcggccttggtggcccacgggtcgtaatcggcaccgttgaccacggccaccttggcagtgccgaacttggcaacatcctggctggtgggctcgtaatcgtgcgcctcaacgttggtcttggtcatgatgttggtgacttcgacgttgctgccgccgaggtcttcggccacggaaccccactggttgatggaggcgacgacctcgatcttgccggaagacgcggcgctgctggaatcggacttgttgccggcggcattgctggaaccgcaggcggccatcgagaacagggtcgccgcggcggccgcgatggcgagcgcgcgcttggcgttggacatgatggacatgattggattttcctctctaattcggctgtttggccaggcgatgctgctgttgctgcatcatcgcccggcccccaacacgacagaataacatgtattgagaattattatcatttgcatttacgtcagtgtgttgcacgcgcacacccgcgctgccggcggaaatcccgcaccccgacgatgacaacgcgggatcccgccgttttcggcagacgaaacggcagtatccccgcgtccgaacgatacccgcgcgggggttctgccgtttaaggcctcggaaacgacagaaatcccgcgccaccttcgttcggacgcgggggttctgccgtttgccgcacatgtcacaacggcatcgcggcacagaccgacgcctgcaccaggtcgacgagccccacggtgtgggcatcctcacagaccagcgcatcacgcaaggcgattgcacggatgatgtcgcggcaggcgcactccccgtctgtatccaaatggcgtgccaggcaaccggcaccaatgaccggcaattcgagcacgcacgaggcctcacggatcaggcgggagaccactacgccggtcgaacgctcgtcatagacgccgttctcctcgcccatgccgcacaggcacaaacggtcgtcgtcaaagaatcgctcttcgaattcgtcaaggcctacggcattggccaccgcacccacgaacatcgactcaccccactcgttgagacggaaggaatcggccagatactgcgcgaccggcgtggcctcaaggcccacaggcagcgagaccagaaacgcgccggcccgcccttgcagcgatccgagcgtccgttcaaggtcatgtttgaccgtgcagctcatgcagcacccctcgagcccgaacgaatcggactcgccgaacaccaccccgcttgcctggggcttcgcgacgttgcgcacgatatcgagaccggattccacggcttcgttcgggcgcacgtcataagcaatcgagcatacggacggaaaggaatcgaccaacgagaacgccacggagtccaggctcaggcggtcggcgccggtgagcagcaccacgggcgtgcgcccctccgcgtttccctgtgattgcaatgccggatgaatcatgacagcctttctaatttgataatggttatcattatgatatagttgcaggcatgtccaaaacatgtcaaattctgggaacacgcgccggggtcggcaaccgcgtctcccactcgcacaggaaaacacgccgaaccttcgccccgaacctgcagtccaagcggtactgggtgccgtccttgcagcggcacgtcacgcttaccgtgagcgccaagggcatcaagaccatcgaccgcatcggcatcgaggcggcgatcgcccgcatccgccgcgatcagaacgtcaactgaaccggccacggcatcacccccatgctcgggcagtcagtaggcccgccactgtgccggcgcgtaaccgcgcaacaaaccgcgctaacgagctgcatcacccacatggcaccgcgacgtacgcgacatacgtgacataacagcgtgacacccacacatagaaagcaccactcatggcaagcaaatcctccgcaatccgcccggtcatcaccctgaagtccacggccggcaccggattcacctacaccaccaccaagaatcgtcgtaatacgccggaccgtcttgagctcaccaagttcgatccggtagtccgcaaacgggtgctcttccgagagacccgctaatccatctgttcgttcattggacaccagtcgcgaggcgaggaagaggcttaagcacccgccgaaatcgtttcctcgttggcattccggcggtttcctctatcaccatttcatgaactcatcttccgaaccttgcggcatgcgcccaatgaacgaatgcactcgtcccagctccggccggcgcgattcccgcgccccggagccttatcaaggagccggacatggccaaaaccagtaagatcaaccgacaattgcagcgcgaacgcatggtcgccaagtatgccgaacgccgcgccgaacacaagcgcgacagcgtcaaccctcatctgaccaccgaagaacgcgccgaggcgatgcgcaagctgcaggccctcccccacgacgccagccccacccgtctgcgcaaccgcgattccatcgacggccgcccgcgcgcctacaaccgcaagttcggcctgtcacgtatcaatctgcgtgagaaggcacacaagggcaaactgcccggcgtggtgaaatccagctggtgatcgggccggcacaaccggccgtcaggccgtctcaggccatctcaattcaccggattccacccgcgcgtccgacgccattctcatccatatcaccacacaacaccacacaaccaaaggtccataaccatgcaagagggcatccaccccgaatacggccccgtggtcttctatgaccgctccgccgacaagtacttcctcaccaagtccacactggtggccaaggccgtaaacctgccgaccatcgactgggaggacggcaacacctacccgctcgtcaatgtggaggtgtccagctacagccacccgttctacaccggcaagaatgtggtgatcgacgccgccggtcaggtgcagaagttcaacgctcgttacgggcgcaagtgattcgccgcacattccgcaaagaccgtaagacaagaagaaaggaacggacatgaaggtcaaggcatcggtccgctcattggcccgcaaggatggctcctatgtcgtccgccggcgcggccatctgtatgtaatcaacaagaagaacccccactggaaggcgaggcaaggctgatggcactgcccaagtacaaggcgtcccgagcaaacacgcattcgcgccgagccaactggaaggccaaggtgcctcagctggccacggtcagaacgcctgaaggcgaagtggttcaggttccgcagaatctggccgcagccgtacgaaaggggtatatgaagccataaccaacatcgtggattccgcaatccatcaagtctcgcaacaacaactcgacggtccgctccacaggccggcggcgtacgttctttctcccatttccttccgtatgccgtcacctgccggggcgaaccgccgttttatgaggccaccgcatccgatctggccaagctcgccaaggcagacatcgtggtgctcaacggcgccggctacgacggctgggcggaaaaggcgcagcttgacaagaaacgccagaccatcgtgaacgtgggcggcctcatgggcgtcaccgccaccgacgagcacgagcattcccacgaccacgccgagggcgaagaaggccgccatcaccaccatggtgctacgaacccgcacctgtggttcagcccggaagccgtgctgaaggccgccgaagccatcaacgccgtctacgcggacaaggccggggtcggttctgccaccgccgccaccgtgcaacgtcacttcaacgacaggaagaaaccctcaaggaaatggacaactggcccacgtattacccggcatccatgagcaaggaggaagtggccaccgagatgctggcccaccgattcgccatcggcccaggcaaccatgtgcaaagttccccgcatatcgacgtgtaccatcggtatgcggggaactcgcatattatctcgaccactatcatgcgtacggtgctaatatgacggcgatatggcaggtgatattcgcatgaaagaacctcgcacgcagcgcacggaacaggtgaacaccgcgcaacaggaccattcggcgaactatctgtttctgattatcggcacgccgctggtggcgttcctgattgcggcttccgcgatgctcgagtcgcgtgggtttccggttccgctggtgcgtatcggcaccggtgccgcggggcttatcctgcaggcgattccgttcatgctgctgggcgcgatgatgtcggccgtggtcagcacgttcgtcagcaccgattctctggcccgccacataccgaaatcgttggccggcggactggccgcggcattggcggccggcctgtgcctaccggtgtgcgattgcatggtggtgcccacgttcgcgaatctgatgcgcaaacgcctgccgctgccgtgtgcggtgacgtttctgtgcgcggtgccggtgatgaacccgatggcgatatggtccacatggttcgcattcaccgacaaaccatggatagtggcggcccgcatggggttgggcatggtagtggcgatagtcgcgggggtgtcgttcgcggtgtggccgctccgctcccctgcggtgcgtgagaggccgctgacgattgggcggtcgttgatttgcgaggattgtgcaggggcgacgggtgattcgcctgagaaccacccccagtcggctttgccgacagcccccgccggcgggggcacggggcgcggattggagcggttcacgcatttcattcggcatacgcatgacgactttatgcggatgatgccgattctgctgttcggcacgatcattgcctccatcatgcgcaccgcattgtcgtcgttgaccaacggttcaagcacgctcgatgacgctggtgccatcgtactgattctggcggcgatgggactggcgttcctgtgttcgctgtgctctacttccgatgcggtgatcgccgccagcatgattggcgcgctgccggtctccgccatgcttgccttcttggtcttcggcccgatgctcgacctcaagaacacgctgatgctggccacggaatgccggccacggttcatcatccggttcatcgcgaccgtggcggcggcctgcttcctcgccgcgattgccgcccatctggtgatgggagcgtagccatgaagcgcaaagtcacactccccgaccgcgtggaggcgctgtgtttcgcggcgctgggcgcggccatcgcctatgcggcggtgggcggatcatacaccacgctgaccacgccgcgttcgctgccgtatctcatcatcggtgcggtactgctgttcgtgctggcgaccgcagcatggctcggactgttccacgccacggagcgttcggttttgcggttcctgatcgccttgattattccggcgctgctgatcgtcgtgccgttccagcccagcagcggcagcggcggcttcgacgagtacgccggcggccgcgctatcgccattccccgcagttcgcacaagcctgatggcgcctcgcagctgcacggactcgacacggcgaacaagaccctgaccatcagcgacgacgaattcggctcatggttcgagcagatcgaccataatccgcagcgttacgtcggttaccatgtgcaggtcaccgggtttgtgagcaagtcgcgtacgttcggcgcgaacgagttcgagctgtcccgccagttcatgtcctgctgcattctcgacatgaccccattcgggttcatagccagctccggcaaggccggcaccccgcacaatcacgactgggtcaccgtcgacgccgtcatcaagcagggcgcctacggctccgccggccacgagcgccaaggcctgatactgcaggtccggtcggccagcaaagccgcagccgccccgaccggctacttctactggcagtaaatgacgcgtctcccgaaatggaaagcactgcgctgcgccatgactcgccccatatcggcagaaatcccgcgttacaacgaaaggtacgcgggggctctgcctttatagggctcaaaactggcagaaatcccgcgcaggcctcgttgaaacgcgggatttctgccagttgattcaaatcatgtgacaacatgccgggcatctaatttgctttaataacgataatgaatatcatttgttaacagaaaggggcagaacgtcatgagcatcgagcaaaccgcgaccactcggcgcgtgacgcgaccccgactcctcatcacccaggtcctggcggaactatcccgattcgccacggcccaggaaatcaccgacatcctgcgcgagcgcggcacgcgcatcggcacggccaccgcctaccgcaatgtgcagatgatggcctcccaaggcgagctcgacgtaatccacgtcaacggcgaggccctctaccgcgagtgctcggaccagcatcaccaccatcacatcgtatgccacgaatgcgggcggaccatcgaaatcgagattcccggacttgagcagtggatcgacaaagcca

SEQ ID NO: 2947 - DNA, 33857 bp, Unknown
  R19_24m  MAG No. k141_5987
accaacggcatcctgctgggctcccacacccgtccgttcggcggcaccttcttcatgttctccgactacgagcgttccgccgttcgtctagccgccctcatggagattccgaacctgtacgtgtggacgcacgactccgtcgccgtcggcgaggatggcccgacccaccagccggttgagcaccttgcttccttccgcgctatcccgcagcttgaggtcgttcgcccggccgatgccttcgagaccgccgaagcctaccgctacttcttcgagaagaagaacacgctgccggctgccatggtgctgtcccgtcagggcgtcccggttctcgccgagaccgctgtcaaggccaaggacggtgtccgcaagggcgcttacgtcctggtcgacaccgaaggcactccggatgtcatcctgatggccaccggttctgaagtccagctggccgtcaaggccgccaagaccctcgctgaggaaggcgtcaaggcccgcgtggtctccgtgccgtccctcgaatggttcgaggagcaggacgccgagtacaaggaggccgtgcttcctgccggtgtcaaggctcgcgtctccgtcgaggccggcgttgccatgccgtggtacaagtacctcggttcctacggcaagcctgtctccatcgagcagttcggtctgcagggcgacggtgctcagaacctcattgacctcggcatcaccgccgagcacgtggtggaagccgccaaggcctccatcgccgaagtcgaagccgccaagtgatttcactgccctccctcactagagggagggcttaacaagatttgttccataacggaatataaggagaaaaataaatgactgaagcaactcagcgtacgtccgacaacggcgtttccatctggctggacgacctgtcccgctcccgcattgagtccggctccctgcaggacctcatcgccaacaagaacgtggtcggcgttaccaccaacccgtccatcttccagaaggccctgagccaggtcggcccgtacgacgctcagctcaaggagctcggcaaggttgacgttgagaccgctgtccgcgagctcaccaccaccgacgtgcgcaacgccaccgacatcttccgcgagatcgctgaggctacggacttcgtcgacggccgcgtctccatcgaggtcgacccgcgtctggcccacgacaccgagaacaccgccaagcaggctgtggaactctgggagaaggtcaaccgtccgaacgccatgatcaagattccggcaaccctcgaaggcctgccggccatcaccgccaccctggccaagggtatctccgtcaacgtcaccctgatcttctcgctcgagcgctacgagcaggtcatcgacgccttcatcgagggcatcgcccaggctgacgccaacggccacgacctgaagcacatcggctccgtcgcttccttcttcgtctcccgcgtggacaccgctgtcgacaagctgctggaagccaacggctccgacgaggccaaggctctggagggcaaggccgctgtggccaacgctcgcctggcttacgagctcttcgagaagaagtttgccgaggatccgcgttgggccgacctggctgccaagggtgccaaggtccagcgtccgctgtgggcctccaccggtaccaagaacgccgcctactccgactgcaagtacgttgacgagctcgttgccaagcacatcgtcaacaccatgccggagaagaccctgaacgctctggccgaccacggcaacggcgctccgtccatcgagggcacctacgaggagtcccacgccgtcatcaacaagctggctgagctgggtatcaacctcaaggacgtcactgacaagctggaggccgacggtgtcgccgccttcatcaagtcctgggattccgtgctggctgacgtccagtccggcatcgaccgcgtgaacgcctgagattattagctgatgcgcatttcgcgcattaactgattagctcacagaagctccgaccccaaccggtcggggcttcttacgtttgttgctacagtagtacgagcacatgagagaaaggccgaaccgtaatgaacaaacttgtcgcacgccagcggttggtgatgacctttaccttcttttcgatgttcttcggagcgggcaacctgatcttcccgccgtttgtcggagctcaggccggttccgcgaccataccggcggccatcggcttcatcgtctccgcggtcggcctgccgattctcggcgtgctggcggtcaccttcgccggtggcttcgacaaactcgccggccgggtctcccccaaattcgccttgttcctcggcttggcgatcatgctcaccatcggcccctgctttgcgattccgcgtacggcgaccacctcgttcgaaatgatggtggcgcctttcgtgccgtcctcctacggctggctggcccaactcatctactcgctcgtgttcttcacactggcgttcctgttcgcccagcatcccgaaaaactctccaaagtgctcggccgattcatgggaccgttgctgctggtgctgattgccgtcctgttcatcgcctgcctaatccacggtatcggtaccccggccaaaccgatgggcgactactccacaaaccagattgcacgtggcttcctcgacggctaccagaccatggatctgctcgccgcgctctatttcggcatcgtgatttccgcgaatatccgcacccagcaggtcgatgacgaatcgcaagtgcagaaggagaccgcgtatgccggactcggcaccggtgtgctgctgatcgtgatctacggcgcactgagctacgtgggcgtggtgtccggtgccatcgccaccatcgatcccgccaaagacacgggcgcgaccgtgctcaccaatctcacctcgtccttgttcggcgcgttcggtaccgcgttcctcggtatcgtcttcgtcatcgcctgcctcaacgtatgcaccggactgatcggtacctgcgccacctacttccacactcggttccagaccgttgcagggagaacgttgagctaccgcacctggcaggtcatcttcaccgtgttcagtttcatcgtgtccaacgccgggctaagcgcgatcatcaaggtttccgtgccggtgttgtccgcactgtatccgatcgccatcgtgctggtgctgctggcgctgacccacaagtcgctcggcgcgcgattcccgcatgtctacttctggaccgtgctgctggtgggcatcgactccttcgccacctgcatctccagcctgatcaccgtcttcggcggctccatcggctggctggacacgacgctggccatgctgcccttgcagcaataccagctcggctgggtggtcccggctatcctcggtgttgccattggtatcgccgatgctccgcgacggtagttcttcccggtctgtgccggagtctggcggtcggtcggtgatggcggttgttgcgacgctcagcggtgccggtgtatcgttcgcaccactatatgagcgcatttggggcggcatgatgctgcatccgaactgtccggcgattggcagaatgacctactatctctcgggccaagcaactgacgattatggagtctgcgtcacctcaccactgtggtttatgacggtgactgcgctgagtgttgtcgcgattctctgtctgaccgttgcgggagtacagggcttttcgcgccatcggctctgttcccgttgccctgttctggtcaggtctcacgttctttacctacagctacaacactggtagacacaccgatttctgcccagcgctatcggcaactgacaatgcaggtcttgtcgcttattgcatcggccgtgaagctttgggactgctgaccgtcgtgttgtgcgtgctgccattgttctccctgctttcggcgattatggccatcacgttggctgcgtacgacgcgacaccaccggcataaaatctccttcatatcacgaaacaacgggcacccgttttgcgaggcattctatccgtcccgtgtttcgcaacgcatgagacggcacatccattgaatcaggagtctagaccatatctcgccgaatcttgcggtaggtggcatagaacaggaagccggccacgatgccggaggtggcgtcggagatgggttcggcgatgaagatgccgttgacgccgatccagtgcggcagcagcagcgcgagcggcacgagcaggatgatcttgcggaagatggccaagaacaccgactgtttggcctggcccatgccgacgagtgcgcattgcgcgcccatctggatgccgaagataccccagccacagacgaaaatcggcatcatgcgggtcacgatgtcgatgaccgtctgttccgaggtgaaccatgaggcgaagaagccggggaatgtggcgagcacgttcgcggcggccgctcccctgacgccccatccgaacacgaaaatgaacacggggtcaagaaggatggatatgccggtgccgatgagtacggagaccatggccacagtggtttcgccaactgcagcagcacggtgagggtcagggctatggcgatgaggaacgcggcgctggtgccgaggatgcgttcggctttcttgaagttgccgcgcccaagttcaatggaggcgcgcggcgcgccgcctgcgccgatcagcgaggtgaaggcggtgacggccagcagaatcgggaagcagatgcccacgccggtcatcgccgcgttgcccacttcggggatgtgcccgatgaacagtcggtcgatgatcgtgtacgaggcgttcgccgcctgcgccacgatggtggggaccgacatggtcagggccagacggggcaccggtttggtgcccagcccggcatcgatcgtgttcgcctgtaccaaggatcagctctgccagtagtagctgaagaagtcggcgagctcccccatggtttcgtgcagcatgcccatgcgcggcaggtacaccacgcggaagtggtcggggcgatgccagttgaacgcgccgccgtggctgatgaggatgtgcttgtcatgcagcaggtcgagcgcgaactgctcgtccgagtggatgttgaagcgtttgacgtcgatcttcgggaagatgtagaacgcggccttcggcttgacggcggtgatgccgggaatctggttgagcatgtcgtaaacgaggtcacgctggtcgtgcacgcggccgcccggcacgatgtagtcgttgacgctctggtggccgccgagcgcggtctgcaccacggactgggcgggcacgttcgagcacatgcgcatgttggcgagcatgttgaggccctcgatgtagtccttggcgatacgcttgttgccggacaggatcatccagccgatgcggtagccggcgatcatgtgcgatttcgacaggccggagaaggtcacgcagaacaggtccggggccatcgaggcgatggagatgtgctgcaggccgtccatgacgaggcgatcgtagatttcgtcggagaagatgatgagctggtgttcacgcgcgatgtcgacgatctgctggagcacttcctttgggtaaagtgcgccggtggggttgttcgggttgatgatgacaatcgccttggtgttgctggtgatcttggagcggatgtcatcgatgtccggataccattcggactgttcgtcgcacaggtagtgcacggcggtgccgccggccaggttcacgcaggcggtccacagcgggtagtccggggagggcacgagcacttcgtcgccggtgtcgagcagcgcggacatggacaggttgatgagctcgctgacgccgttgccggtgtagatgtcgtcgatggtgacgttcgggatgttcttcagctgcgcgtactgcatgatggccttgcgcgcggagaacaggcccttggacggcgagtagccttcggtgtcggtgagctggtgggccatgtcatagacgacttcgtccggcgtgcggaagccgaagggtgctggattgccgatgttcaatttcaggatgtgggtgccgttggcctccatgcgcatcgcctcgtcggcgaccgggccgcgcacgtcgtagagcacgttgtcgagcttgtgcgatttgccgaaggtacggcggcggcccacgggaatctcgctgtccgtcaggggcttggcggtgcccgtggcaagcggcgtggcggcgtgttcgccgtccgtgacgctgttggaagcgtccgagttcaattgcggggtggattcctcgccgcgcagccagttcgcgtcgacgtccagttcgctggccaggaattcgagcacgtcttcgcggggcatggtcttgccggccacgtattggctgatatggctcttgcccatctttacgccacgatgttcggcggcgtgcaccaaatcgacctgcttcaatcccctactgttcatcgcattgcgcagacgttccgcaaacaccgatacgctcatatccttatgcctccaaccgggagttcaatttatcttttgaacaacagttcaaagcatactcccggttcaacacaagttcaattttggcgtgttctcgagtctcggccggctcagcccaactgcgcttcaatccattgggcgacgccgtcctcgttgttgggcgggcagatctcgtcggcgatagacaacaccttggggttcgcgttggccacggccacaccccggccggattcgctcatcatgttgatatcgatgaggtcgtcgccgaaggcggcggtctgttcgagcggcacgtccagtcgttcgcacagcaggtgcagcgcgtgctccttgttggcctgcgggttcatgagcatccacatcacgccttcgctaatggagatgtcgaagtccggcggaatcagcgcacgcagctcgttccactgttcaggctcggggaagatggtgatcttatccgccacgccttcgggcacgtcgtggaagttcgtgtattggaaggcctgtgttttccaatacacgcgcacatcgaagttggtgtagcgcacgtcgttcatcacgatgccgagcttcaggccgggcatgcgatcgagcaggaacagacagacttcgcaggcacgccgtgaggagaagccaatcttgatcaaatggttctcatcggccggcgtggcacctgaggtgagcaggtcgaagtcggagtgggccgggtcgaaatcgatgagggcaccgttcagatagattacggcgtccaccggcagtttttcggcgaactggaggccggtactcaccggccgcgcggtggcgatggcgaatttcagtccggcatcgtgcgcgcggttgatggtgtcgatgctgctctgggtgatgaaccggtcctcgaatacctcggcgtcgtgcagcaacgtaccgtcgaggtcggcgaccagcagtcggggttgtttcggtgtgatggcgtcgagaatcacagcagcccctcgcagtgttcacgcacgagttcggcggaatggtgcaatttggcctgctcgtcctcgctcagatcgagttcgacgatctcgttggcaccattggcgcgcagttcagtggggacgccgaggaacacgtcatgttcgccgtattcgccgttcagcagggtggagacgggtacgatgcggcgttcgtcccacaggatggtctgcacgatgccggccacggtggaggcgatgccgaagttggtaccgcccttggccgcgacgatctcatcgccacgggtgcgggtcttctcttcgatttcggtggtggacacggaggcgaaacggtcttggttgtcggccaggaagcgggcgaatggcttgccgccgagcgagacggtggaccatgcggtgaactgggagtcgccgtgctcgcccatcacgaagccgcccacgttacgcgggtcgaggccggtctcttcgccgatgatggtcttgagacgcgaggtgtcgagcgcggtgccggtgcccagcacctgggtgcgcggcaggccggaacgtttccaggcataccaggccatcacatcgaccgggttggagaccatgacgatcacgccgtcgaagccggaggccatgacgttgtcgaccacttcgcccacaaggcccacggtgaagccgagttcggccatgcggttggagttggccggcggcttgcggcccacggtgatgacgacgatgtccgcgtccttgcagtcggcgtagtcgccggcgcgcaccttgacgtggcggtcctggaattcgctgccgtcatcgaggtcgcgggcctcccccagggctttggcggcggagcggtcgatgagcacgagctcattgcacaggccgtgcgtgacgatgccgaaggcggcggtggcaccgacctggccagtgccgacgataacgactttgttgcggttcatagtgaccatggtgatgtcctttcgtaatactcgatagaacgcatacgacccatgaccgacggtaacggtcatgggtcgcgagcgacaagtctatatggcgtgcaagccgatcagccgaggttgaacttggtcatcatgtcgaggccgatgatcaatgccacccacacgagagcgatgataacggtccaacggttcaggttcttttcggcgacaccggaagtaccggcgttctgggtcagaccgccgccgaacatgtcggacaaaccgccgcccttgcccttgtgcataaggatgagcagggtcagcacgaagctgagcagcacgacgatgacttgcagcgtgatcttaagagcggtcacagggtacctccggattgattggactgttgaccagcatagcgcacacacgggaaaaccgtggtattagttccgtgatttcgtggatttcagtgccagtcgagcgattttggcgagttcctcaacatccagggccgcccctccgatcaggaagccgtcgacgtcgggttgggaaatgagttccgccgcgtttttcgaggtgaccgatccgccgtacaggatacgtacgctatcggataccttcgtgccaaaagtggtcttcaaatcgttgcggatggcgtttgcggcatcctgggcggattgcggagtggccaccatgccggtgccaatggcccagacaggttcgtaggccacgatgagttcggcggcttgttcttcgttgagatcgcgggtgacgtctcgtacctggcccacggcgaaatcgagttcaatgccttgacgtcgttcctcgaagctttcgccgacgcacaaaatcggctgcatgccggcggcgagcacggcacgtacctgatcgacgatattggcgtcatcttcaggatggtatttgcggcgttcggagtggccgacgatgacgtacgagcagccgagatgggcgatcatgtccgcggacacatcgccggtgaaggcaccttgggtggtcacggaaacggattgtgcgccgtaggcgacatggagcttgtcggcttcgaccagcacctgtacgctgcgcaatgacgtgaacgaggggaaaagcgcgacttcgcagcgtttgaagtcaaagcgagcgtcacgcaacagccataccagcttctgcacgaagtaagtggcttcaagatggtcgaaattcatcttccagttgccggccaccaacggaatgcgtttggacgccatatgtttcccctctaaaaaatacgtagctcccctcaaggaggggagctagaaaatggattactcaagcaccttcagaccagggagctccttgccttcgaggaactcgagggaagcgccgccaccggtggagatgtgggagaagccgtcctccgggaagccgaggttacgcacggcggaggcggagtcgccgccaccgacgatggtgaacgcaccggctgcggtggcgtcgaccagaccctgggccacggccttggtgccggaggcgaactcaggaacctcgaacacgcccatcgggccgttccacacgacggtcttggagtcgacgatcttgtcgtggaagagcttctgggactccgggccaatgtccagacccatcttgtcggccgggatggcgtcggcggcaacgacttccggagcaaccggggtgtcaccggccgggaagccggcgttcacggcgacgtcggtcggcagcacgagctcaacgccgttcttctcggcggtctcgatgtagcccttgaccttctcaagctggtcctcttcaagcagggaggtgccgacctcgtagcccttggccttgaggaaggtgaacaccatgccgccgccgatgaccagacggttggccttgtcgagcaggttctcgatgacgccgagcttgtcggagaccttggaaccgccgagcaccacggtgaacggacgctccgggttctcggtggccttggacagggccttgacttccttctcgaccagcaggcctgcggcggccggcagatcggcggcaacgtcgtagttggagccctgggcgcggtggaccacgccgaagccatcggaaacgaaggcctcgccgagggcggcgatcttcttggcgtaagcggcgcgttcgtcggcgtccttagaggtctcctccgggttgaagcgaacgttctcaagcagcacaacatcgccatcgttcatggcggcgaccttggcctgagcgtcctcgccgtaggtgtccttggccagcggcacgttggtgccgagcagctcgccgaggcgggcggcaaccggggccaggctcagctcaggaacgaccttgcccttcgggcggccaaggtgggccatgaggatgaccttggcgccttcttcgcgcagggtcttgatggtcggcagagcagccttgattcgaccgtcatcggtgatggtggtgccgtccagcggaacattgaaatcagcgcgaaccaaaacgcgcttgcccttgagatctccaaggtccttgagtgtcttcatgaatatcctttccttgacgaatcgcacgtcaaagtggccaattttgccactttgcatattacaggcattccggaacaaaacaccgcattcgcctactgactgaatgcggtgtttcgttacgtcgttgtcgggttacttgccttcggctgcgcgagccttctccgttttctcggcaagctgaagcagtcggcgaattcggccggcaatcgcatccttggtgatttgcggttcggcgatcttgccaagctcctcgaggctcttgtccacgtgatcgatgcgcagctggccggcctgacggaggttgtccggaatgttatcgccgagcacttcgaaggcatgctgcactttttcgctggcttcggcggcagccttggcggaacggcgcatattggcgtcatcgaagttggccagacggttggccttgccgcgggcctcgccgtcggagcgcttgccggtccattcgcgggccgaacgggtggcgcccatgagcttgagcatgcgttcgatggcgtcgggatccttgagggtcacgcgctcggagctgcgcagcgtgcgatgcttggcctggatgccgagacgacgggccacgccacacagggccatggcggcctcttccgtggggcaagcgatttccaggaagctggccttaccgggatcggataggaagccacgggccatgaaggcgccgcgccatgctgctttgatttgggcgatggatccgttgaccacttcagacggcagtccacggacctgctgcttgcggcggtcgaccagtccggtctgcaaagccaaggccactacgttgcgggtgatgagcaccacgtaggtctcgacagggccgttcggggtctgacgggtgaggtggttgacctcggcttcatgcccgaacgtgttcctcaacgtgttcttcagccattctgcaacgtcaagcgaggtgaatacggcttggataacgtatgtattctgtaccggtcgaagaccgccgccaaaacggatcatggccgcagcttgggccttgatcgcggctggtgaatcgccttcaaaggccgccaactcgcttttgacatcgtccagaagagccaagatctacctcctacagtcccgttcttctcaatgcttcaggcgcttcgtgccgttatctgctgtcatacggtcggaagccatcggctttctgtgatacctaatctggtggacaagcgaacccgtttgatacgtattatgggctttgctttctcgcagtgtggtcaccgaacgcttgcccgatgaccgctcgacgcctgcttacgatgagtgacgcttatgctgttctctcgcggaaacggttacgttgagcccatgtgcgcgtaagcggcgagccagctcttcgctcatcgccaccgaccggtgctgaccaccggtgcagccgacggcgatggttacatagtgcttgtcttcctgggcgtatccttccaacgcaatctcgatagctttctcataagcgtcgagaaattccttggctcccttgctggaaagcacgtagtcggcgaccggcttgtcgtgcccggtaagctcgcgcaggttgggaacccagaacgggttgggcagaaaacgcacatcggccacgaaatcggcgtcgatgggcatgccgtatttgaagccgaagctgaagatgtgtaccgccacggtggtggggccggaaccgagcatcgtctcgtagagtttggtggacagctggtggatgctcagggagctggtgtcaatgacccagtcggctcgctccttgaggtcttccagcaggtgacgttcctcaaggatgccgtcgatcagtcggttgccgtgctgcagcgggtgcgggcggcgcacggattcatagcgcttgatgagcacttcgttgctggcgtcgaggaacagaatatgggttttgacgccgagatcatccagatggccgagcacggcggccagctcgtcgaaatagctggagcgcacgtcgatgacggcggcaagcttgtggacgcccgatcccgatccggaaccggaggtggtcatcatgtcgacaagcgggataagcagtttgggaggcaggttgtcgaccacataccatcccatgtcttccacgcagtcagcggcatgagagcggcctgcgccggacataccggtgatgagcagcacctcgaaggcatcaagcggggtcggctggttgtccggagtcgatgtggatgtcgcggaattcgccggcgcattcgtggcggccgcctcgccggtatcgcggattgttgtctgttgactcattacaacgcctcctcaagagctttgcgcatcgcgatctccagctggtcgtcttcggtggtggtgtcctgcagacgctggtcggcatcgctgggcgggtcgtcatcccagataccggtcatcagcaatacctgtacgagagcttggtacagcagcatttcttcgccgccgatggcgtgaccgccatgagcgcgccaggcttccatgagcttggtggggcgtggatcgtagaccacgtccagcagcagtccggagaatggctcggttccggcattggtgagggcatccgcgacgttgtcggccgcatgtccgggaatcgtgttgatgacataggtggcgttgcgggctgcctcgagcagggcctgatcgtcgcctaattcgatttcgctgtacgggttatgcacgttgacgaacttttcggccactggtttaagcccggtgtttttcccagggtggcgggcggcgacgatgatatggccgatttcgggcatcatgcagcatgcggccaacgccgaagtggcggtgttgccattgccgaggatcagcgcggcgccgcttctcgatgcggtgtggtgttcgccgagttcgcgattggcgtggtcgaaggcgagttggatgccgatgacatcggtgttgtacagcttgatgcccggcttgccgttcggccaagcgggatcatcggtagccacactccagtcgaataccgcggtattcgccaccttcagttccttggcccacagattttccggaacaccgtacggttggatggtcttcttcaacggcatggtcaggctcaggccagcccacgtcgagccaaggcctttgaggaaagcgtcgaggtcgtcttcccccacctcgtgcttgtcgtacagccaatcgtcgagtttcagcgaacgataagccgcgttgtggagcacgggtgacaatgagtgcgcgacgggtttgccgagtacagcgcaacgatgattggccatatcccctccttgatgtctgtttccatgctagccgacactttgcttcgaatatgtcaaccacaggccccgcaaccgaaaattcactctgggctgctggaccgggccggctcactgctcgtgcagcgcgttgtacagcgctttggctttggcgtggccgatgcctttgaccttctcgaagtcctcgacactggcttcgcgcatggctttgaccgagccgaagtggttgagcagccgcttctggtagctttcgccgatgccgggaatctcgtcgagcgcgctgcgcagggcgcctttgcgccgctgttggcggtggtaggtgatggcgaagcggtgggattcgtcgcgtacacgctgcagcagatacatgccttcggactggcgtttgaggatgatcggatagtcgtcgtccggcacccacacctcttccaagcgtttggccagtccgcagacggccacgtcgatcacgccacagtcctcaagcgccttggcggcggccatgacctgtggcttaccgccgtcgaccaccaccaggttcggcgtgtaggcaaagtgatgccggtttgtgttctgctggacgatgtcgggcgaggactcccgtgcatcgttctgcactccgaccggcaccgcgtgccccttgccactgatgtcggaaccgccctcaccattgtcgttaccgttcgcaacgattgtctccgccgccacggcagtggtcatcttgccggcggccgaggccgcgcgctgttccgcgtcgatgctttcgccggagtcgccggcgatgttgccgtgcctgaagcggcgggtgagcgtctcgtaaagcgcggacagatcatccaccgcgcctttgccgtccttgcctcggacggcgaagcgtcggtattcggatttcttggcgatcgcgtcttcgaacaccaccatggaggccacttggaaggcaccgcccacagtgttcgaaatgtcgtagcattcgatgcgcagcggggcttgcgcgagtcccaatgccttggccacatcgttcatggcctgggtgcgtgcgcccatgtcggagatgcggctcatcttgctgcgttgcagtgcttggctggcgttctcgttggcgcggtccataagctgcttcttgtcgcctcgcgaggccacgcggatggtcaccgcgcccccgcgcagattggtcagccagccttcgagttcctcgcggcgggccggttcgacgggcacgatgatttcgcgcggtaccggtgcgatgggtgccagcaggtccgcgcgtccggtggtctcctgacgggtgttgcgttctcgggtggcctgggcgcgtgccacagcgtccgtggccgtgatggtctgtgtggagccgatggcctcgcgattggtggagatggtcgcggccgactgggggtgattgtccccggcggcgtccgaatacacctgcaccagaaggtcggccatcaagtcggcgtcatcgatgtcctcaactcgttcgacgctccagttgcgttcgccgcgaatagagccggcgcgcacataaaaggcgtgcaccgaggcttcgagctcgtcgctggcgaagccgaacacgtccgcgtccacatcctggtcgaagacgacggcgttctgttgcaccacggtttccagcatttggatctggtcgcgcagtcgggcggctttctcgaattcgagttcggcgctggcctctttcatgtcgcgggtcaactgggcgatgtatggccgtccgaggcgtccggtcatcacgccgaccagctgttcgcacagccgccggtgttcgtccgcttcgatacggttcacgcagggtgcggagcatttgccgatggaggcgaacaggcatggccgtccggtcagttgcgccttgtggaatacgttggtggtgcaggtgcggaccgggaacgtgcgcaacagccggtcaaggctgtgccgcaattcccatactttggcataggggccgaaataccgggtatcccgacgtttgcgcgaccgagtgacccacacgcgcggaattcgctcccccgtgctgaccgcgagatacggataggtcttgtcgtcgcggaactgcacgttgaaccgtgggtcgaattccttgatccacgtgtattccaacgtcagtgattccagttcggtggcgacgaccgtccactccagactgcgtgcggtcagcaccatggtctgcgtgcgcggatgcagcagatacagcggctggaaataattggtgagcctgttgcgcaggttcttcgccttgcccacataaatgacgcgcccttccccgtcgcgccatttgtacacaccgggtttggtgggaatatccgaggtcttgggtcggaacaggtcgcgagaatcccccagcaaaggtgccccattcgcattcaccttcgccgtcgtttccccggcgcccacagctacgctttccggcattaacgccgccgcggtcttccgccactcatccggactatgccgctcaatatcgttcgtcataatcctcctcgctattaagcaaaaccaatcatcagggattgggcgggttggtatgtgctgctggaccgtaaagacttgacctgagcggcccggagcatgtccagcaacataccaccccaacccacccgaggtcagctgcaatggaaggctaaagcatgggcttcaggaacttgccggtccatgaggattcgcattcggcaacctgttcgggcgtgccctgcgtgacgatggtgccgcctccgtcgccgccctccggaccgagatcgatcagccagtcggcctccttgatcacatccagattatgttcgatgacgatgaccgtattgcccttgtccaccagggactgcagcaccttgagcagcttgttcacgtcttcgaagtgcaggccagtggtcggctcgtcgaggatgtacacggttttgccgtcggatcggcgctgcagctcggtggcaagcttgacgcgctgcgattcgccgccggacagggtgggtgcgggctggccgagtcggatgtagccgaggccgacgtccacgagggtcttcaggtatcgggagatgccggtgtacgccttgaagaagtcggcggcctcctcgatgggcatgttgaggatgtcggccacggtcttgccgttgtacgtgacttcaagggtctcgcggttgtatcgtttgccgtggcagacctcgcagtccacgtagacgtcgggcaggaagttcatttcgatcttcagcgtgccgtcgccgtggcaggcctcgcatcggccgcctttgacgttgaaactgaagcggccggggccgtagccgcgcacctgggcttcgggagtcttggcgaaaagggtgcggatcttgtcccacacaccggtgtaggtggcggggttggatcgcggcgtgcggccgatcgggttctggtcgacgtggatcaccttgcgcacctggtccacgccttccacgcgcctgtggcggccgggtacgatgcgtgcaccgttgagcttgtcggcgagcaccgggtagaggatcgtgttgaccagcgaggatttgccggagccggagacgccggtgaccacggtgagcacgccgagcgggaagctcacgtcgatgttcttgaggttgttctcgcgggcacccacgactttgagcacctgggtcttgtggatcttgcggcgcttggcgggcacggcgatctctcgccggtgggcgatgtagtcgccggtgatggagcgcttggcttcgatgaggtgcttggcggggccggagtagatgacttcgccgccgtgttcgccagcgccggggccgatgtcgaccacccagtcggcgcggcgtatcgtgtcctcgtcgtgttcgacgacgatcagcgtgttgccgagatcgcgcaggtggtgcagggtttcgatgaggcgttcgttgtcacgctggtgcaggccgatggacggctcgtcgagcacgtacatgacgccgaccaggccggagccgatctgcgtggcgagtcggatgcgctgcgcttctccgccggacagggtggcggccgcgcgcgagagggtcaggtagtcgaggccgacgtcgttcaggaagccgagtcgggccttgatctccttgagcacttcgccggcgatcagctgtgccgagccttcgagtttcaggccgttgatccaggcgagttcgcgtacgacgggcatgtcacatacgtcgaagatggatttgccgtccacggtgacagagagcacctcgggcttcagacgacgtccgtggcagacctggcagggcacttcgcgcatgtacgactcgtagtattcgcgcatggactgcgaatcggtttcgtcgtggcgtcgcatgagcgtgcggatcacgccttcgaagccggtggagtattcacgcaggcgtccccagcgattgcggtaggagacgttgaccttgaagtcgtggccgtagaggatgtcgtgcttgacgtcgtccggcaggcccttccaaggggtcttcatggagaagcccatttccttggccagaccttcgaggatgtggccgtagtactgggaggtcatcttggtgccgctccacggttcgatgacgccgtcggccagtgacttgtccgggtcggagatgatgaggtccgggtcgatttccagtttgaagccgagaccggtgcaggcggggcaggcaccgtagggggcgttgaaggagaaggtgcgcggctcgacctcatcgagttcgagcgtgtgcccgttcgggcagctgcggtgttcggagaacggctggcggcgggccgggctgccttcctcctcgtccacgaagtcgatgacgatgctgccgttggcgagcttgagggcggtttccaccgaatcagtcaaacgttggcggataccgtccttgaccacgagtcggtcgaccacgacctcgatggtgtgcttcttctgcttggtgagtttgatgtcgtcggacagctgtgtcatctcgccgtcgatgagcgcgcgggcgtagccgtcggagcgcagcagctcgatcatgtccacgaactcgcccttgcggcccttgaccacgggcgagagaatctggaatcgagtgcgctccgggtagccgagcagcgtgtcgacgatctgctgcggggtctgggaggcgacgggctcgccgcattcggggcagtgcgggatgccggtgcgggcgaagaggagtcgcaggtaatcgtagatttcggtgatggtgccgacggtcgaacgcgggttgcggttggtggtcttctgatcgatggagacggccgggctcaggccctcgatgaagtcaacatcgggcttgtccatctgacccaggaactggcgggcgtaggcggacagggattcgacgtagcgtcgctggccttcggcgaacagggtgtcaaacgcgagcgaggatttgccggaaccggacaggccggtgaacacgaccatacggttgcgtggaatcgccaggtcgacattcttgaggttgtgttcgcgagcaccctgaatcgtgatcttgagatcgttcgggatgtgcgagatatcagctaccagcgaaccatcgtgttcgatcagcggcgcctttttgatttcccggctcaggaaggagtcgctggtcatcaccttttcgacgatgacctcaccgttcttgcctttgctggttttcgcgccctttgcgcttgttgcgcgccttgcgccagtccgcgttgccgccacagccacaccccaccttccatctcaccgttcccgcgcgcacggttatgcgcgcgccaaatctgtcccaaggatacccgaacacacgaccaaattcgaacgcttgttcgatggcgtgtcaggccggaaaaccgaaccatagtatgcaaaattccggaccatcagtggaccgaaacgcaagagccggcccacgcgacatcaaccgtgcgcccagccccagtcaagctctatcccgaagacctctcctcctctgatttgccccggttcgcatgtcaatcgtttgacgtccgcatcggggcaaaacccgctgtcccggttcgtgattttggcctgttttcgagaaccaggacattccagtttccacgaaccacataaaacgcgaacggaaacggcggaataaagccaatctcagaatcgccatgttgtcccgattctcgcatcaaacgattgacgcccataccggggcaacacaacatgtcccggttcgcgaaaaacacccgaaatcacaaaccgggacaacggattctgccccggtacgtccgtcaaacgattgatgttcgaaccgggacaaaatcttcaatggactccacggggatgccaagcttgcgtaattcgtcaactgcatcacgcatgggaatgcgttcctgttcgatacgccgataagcgatggttttgtcagcacacagtcgttcataaagacgtcgctccgccgattgaaggccgggcgtcggcttaggctcccgcatagcaatcttcgcgctgcgttcagtacgatcggtaccaaaatcgtcgtggcccggatcgagataacggaaccgcagttcggtcggccgttttgacagacccaacgtttcgacaccgagcagtcggcaaatggccttacgccgattggtttttgactcattcagccatttgccgctgaatcctgtcagtggaatctgtgcgacggtgcgcttcgcgatattccgccgccagcgtacgaccaaccacacgcatggctattgattcgtcaggaacgacgactttggagatcaactcgacagaggtgcctatggtgcgatgcttggttatgatttcgcaaccattcttgcttgcccattgccgtatctcattgttgttgtcatgcactgcaatcgcattggtttccaaaaatgcttggtccggcaatcccaccggcacgggaaatggccatgccggttcgatgtcgtacatatgtgaacgcatatgtttcttcacgcatgtggtgatcgcagcgatgtctttcatgccggccatagttcccatcacctgctttcgaacatcgtcgagtcgaaccgaatcgtcttaataccggcgacgccgggactgctcattcggcaaccccgtcatccttcgatatatccgacgatgattcatcgtccatgtcattctgatgcagcacggcctcgcacagggaggtgaggccggtgtcggggtccttgtaggtcacgtaggccttggtggagacctcgaggatttcaccggtcttgctttccggggcggagacgatgacctggaatccgaggcgcggcagcaccgtgagggcgcgctgcgtgtaacggccgtcggccttgatgagcgcctcgtcgaggaacagcgtggtgtacgagggctcgctggtcaggccgccgccgagcaggtagatgagcgccgcgccgtatacgaacgaggtgagctcctgcaaggcgccgcccgaacggccgccggtggaggtgatgcgttcgtccggaccgtcggcatgatgcacgatggcgtagaaggacgagcggcagcgcgggtcgaggttgcgggcgccgtagcttttcacgccgttcgtgtccttgacctgcgcgagttcggcgcgcagcagcccgaccatcggcgcgcaggccgcgaaagccttgcgcgaggcgtcggaatcgttgacgtcggcggatttccaatcgttcagggtgccgatgacgcggatgagctgcgcccagaaggtgcgctcgggacggcgcacgtccgcgtgcagggacaggctgccgtgcttggggccgaactgttggcccttgagcatggcgttgatgcggtcaagctggtcgtggatgtcgctggcatccgtgtcgatggcgcgtttgatggtcaggaagctcctgagcagctgttcgaggcagcgccggtattcggcgtcggtggcggcaaccgcggccagctgggtgaggctggcgagttcgtcgagatagtaccggtagtcctccacgctggcggtcagcgaatcatcgtcggccgcgtagagcgcgatgtaggtgctcattttcgattcgacgccggtgcgcgcggcgtcggcctggccgttcagcagattgatgcgggaggccatgtccttgccgatgccggcgatggtgcgttcggggaagctctcccccggcgcctgcgttccggccacgcccgcgccgatgatcatgtgcgcgcgcatggccgcgtccgccaatccggcgaatcggttgtcgtaggattcggcgagcgccgccgtgacttcgtccggcagcgggccggaagcggcgtcatcgtcattgtcggcggtggcaccggcggcgtccgtcgtgccggtgtcggcatggtcgcgcagccagatgagcgccgcttcgacggcgctgccggcgcgggccgcggcctggtcggattcgatgcgctggcgttccgcacggtcgagttcggcgttcagttcgtcgcgctgtttggcgagttcggcgagtttgggatcgtttttgatggatgcgatggcgtcctgcgtgtccgtgatggtccgttgcgcgccggcgatgtcgatgcgttcccatgacgtgtaggcgagctggttggctagttcgagttcgcggtggaggttatcggactgtgttttggcggccgtgtagtcggtgtcggcttggctgagcgcgttgcgggcggcgtcgacctgcgctgcgagcgcgttgaggtaggtttcgttgacgaatccgatgacctgggcgcggtctttggtgccgtgctggccgcgtgcgccggatttgatctgaccgtcggcctgcacctgacggttggtgcggtcggtgtcgtcgatggcggtgacgcatagggcgtcgaatcgttcgtcctgggtctgcgagcgcagccagtcggcgaagggcgagtcgtcgcggtagcgcagtttgccggacagccagtcgccgtcctgttctccggtgagtatgttcgcgtgcgcgccggtgtcgtcgtagtggcgtgcggtgtccacgaactgccaggtgcgtcggggcatggtgcgcgggtcgatggtgctgactttggcggcgaagccctgttcgtggcgcttgtcgacgaggatggtctgggcgatgggcgcgtaggcgacgttcatggcgagacgccagtcttcctcgtgttcgttcacgtccatgagttcggccacgtacggcagttcggcgggggcgagtccggtggcgcggcagagcatggcgcgggtttcgtccatctgctgggagatgcgggtgcgctgggagcgttgccggtcgaagtcgcgttgcagtcgttcgaggtcgccgcgtgcgccggcccgtgcgttgatggcggcggtgagggcttcctcgcattcgccgtctcgtttgttgtattcgcgtttgaagttcacggcgttgatgcggcgttcgttccaggactgttcgttgccgggcagtgtctcgccgatggatgcgaacgtttgttcgattcgtgttcggttggcttgcatgtcttcgagggtgcggcgggcctggtcgagttcgagttcgagtcgggtcaggttgccgccgtccagaccctgcatctggcctcggatcatgtcgaggcgggtgcgcaggtcttcggttcggcggcgcagcagcttggcttccgcctcgctgttctgttgttcggcgcggtcggcgggcagttgggcggcgacttcgccgcgcatgcgggccaatgcccagtcgcgcagcacggccggcaccgtgccgtcgacggccggcttgaccggttcgaaggcgcgggccttgccgcgtgcggcggcgtattcgccgtaggcctgttggatgccgcgcagcgtgtccatgcggcgggtcttctcgtccatggcgtggaagttctcgtcgtaacgttcgtagtcctcgaccgtggtgcgggccaggtccagggcttcgggcacgccgagcacgccttgtttgaagatgtcgtcgagccgggagggcgcgtcggcggactggatcttgtgcagcagtcggcaggcggcctcgctcaggcccattgcgctccagatgtgtgtgtggaacgcttcggcgctggggaatgtgaggcagtcggggtaggtggctttgagctgggctggtgtgaacggggcgtcacggtattggtccatgcgcctggggtccacgggcttgccccagaccacgtactggcggcgcacgtcgccgcggccgtcgccgggcatcaggtagaggaatttggcgcaggaaagcacctggccggtggtctggttgcgataggtgtccacgatggcgccccacacgggttgcggcgcgccgttctcgtcgcgaccgcgcaggtagagcggctcgtcgccggtttcggtgctgcccacgccgaccatgccgcgcaggtaggtgtagtcgctgcgttcggagcggccggagttcgaggccttgttgaacggcgtgccggtcgggtacagcagggagatctgcgcgtcgaccagcgtggatttgccggattcgctggcgccggcgagcagggtcaccggcagcttgtggtccgtggaggggcggaattcgtggtagccctcataggagccccagttgatgagtcggcgggattccagcatccaccggtccgcgatcatctgcacgtctgtcgcctgcatcattcggctcccttctcgtcgtcatcgtcatcttccgtgtcgccgtcgccgtgttccgcgacgtcgagccaggtgtcggccagttcgcggtcgagcaccacgggcacgagcggcgtgatctggtacatggcttcgtcgtccaggcgcgccaaatacccgtaggtgatcatcgcggagacgatggtgccgatctgctttgccacgccttcctcgtcattgcgggctgccaggtaaccggcgccggtggcgagcgcggcgcggatctcctcaaagctgacgagccagtcggcggggtcggcgtgcacgttctcgtattcgaggacgcggatgcgcaggaaggcgagcagcgcggcctcctcgcgtttgaggctgacacgggttttgagcgagcgcagggtcacgtcgtcgccggccacgggcgtggcgtacatgatgcggtagcgttcgttgatcaccaagtcgagcaggtcgttgttcagggagcgtacgacgacgtcgcggttgtcgagcacggtgtcgtaggtgggcccgctgatatagcggtcgcgtttgagggcgatggcggccatgcgtgcctcggccggcatgtcgccggtgtcgccttcgaacagggcgtacgggttggcgttgtccatgtgctcctcgtgttcctcggccacggtcatccttcctccacaatgatgttcagctcgtccatgtcggccagcaccggtctagtgatccagtgccggggctcgccgtcgatcgatacgcaatgccaagtcgcggtatcgccgcgctgcgccggggccggctcggtggcgatgtcgctgtcgatgccgacgccgtcagtggacggctcgtcggcgatggcgctgccgcttacggctcccagcccgcccaggaagccgacgatctcgctttcgcggcgttcgctttcgggcagccggttgaagctggcggcgatgtccacgagggttgcgttggacctgtcatcggacctgtcaacggtcaccgggttgcgccggatgaggctgaccatgcgcaggagtcgggggccgccgctgttgaccatatcccgcagatcggccaccggagtcgcctgcggggcttcggcggcgaggtcgctcaggccgggtgcggtggcgcgggtcatggatttggccgggcgcatcggcaatggcgcgaacagcgcgtccgcggtggccgtgtcgtacgggcgcgaggcgtctcccatatgggttttcgcatccgcgttgaggcgcgcgtacagtcggttcaagcgggtgagcatcgtacggtagcgagtgtcggtttgctggcgcacgagccggctgatcgcctcgtcggagacgcgcatctggcggcgcacggcttcgatgccgtcgtagatgcgggccagttcgtcgcggatctggccgagcagcacgccggattcgccggccagatacggggttttggcgatggcgcgcagggcttcgtcgatttgctggcggccctcgtcggtgatgatcacctggaaggcgtcctcgaagcggcggccgctgtccgattcgctgaacgagcggcggtattcgtcgtggtagcgggtcaggttctcgtccacgctgatgtcgccggtctgcatgcgccggcgcaaggcgtcgccgttgtcccgctcgtcgagcacgagttcgcgcaggtcgatgggtacgccgcgcagcgtgttgtggatcacggcgatcacgtcctccacttgggcttcgctcagcgtggcgtgctgcttgccctgttggatgcgtttgatctcgtgcttgcgttccttgatttcacggttgaggagtttgatgcgctcgccggggtcggcggtcagctgcatgcgcgcgtgttcgatttccatgatgatgctgttggcctgcgcgccggacagggcgcgtgattcgtcttcgagcctgctcagcgcctcgatggcgcggtgggcgcgggccgtcaaacggtagaggaatcggtgtgtggccgcatcatgcgagttggcgagccaggcgtagtcgccttcgccttcacgggtcaggtcggcgaggatctgatgggcggcctcggcgaaggtctggtcctcgcgcggcgcatattcgccggcgtcggccagagcgttcagactttgcgcgaaccgctcctccacggtctcgcgcggcagctcgccggtgagcgggtcgaacgtggaacgcagcagcgacacgtacagcatcgcgttctggcgcaacagcaaccgcaggacgcccgtctcatacaccggtcgcagccgttccagctcccgcatcacatcggccacagcatgcctccctctgtcgtgaccgcaccatactagccgatagccgcgaaccacaccccgcccgcgccacgcgtgctctctcccgcccagcaccaatatgtcacttttactgcacatgtcatcatgtgcagtaaaagtgacattgaggctgcgcactcatggtgatcgttcactccagccgtcgcccctattcgccgcgcagggcctcggtcggggtgagacgggcggcgcgggaggccgggtagaggccggcgaggatgccgaccaggatggcggcggcccaggcgagcggcagggaggtccagtcgagggcgatcggctggccggcactggcggcgacgccgatggcagcgccggcgccgagcgcgatgccggcgaatccgccgagtgtggacaggagggccgcttcggtgacgaattgcatgcggatgttgccgggcgtggcgccgagcgcgcgtctcaggccgatttcgccgcgacgttccatcacggtgacaatcatcatgttggcgatgctcatgccgcccacggccagcgcgatcacgccgatcatcaggccgagcgtggtcagtgaatcgttggtggtgtttcgcgctttggataggtcggcggacgcggtgacggacacgttgccgccggccgggttggcggcgtgggcgagcgtgcggcgggtgccttcggcgtcgccgggcgtggtgcgcacgtagatggcgctgatccgtccgatggtgtcggcctggtcggggtaccggccgagcgcccattgctcgccgatgatgacggcggcgttcatgttttcagcctgcggcgtggggttcaggatgccgatgacgccgtaccatgcgttgtcgatgaggatgcggtcgccgggctcgttgacgccgagccggtaggcggcgtccgagccgagcacggcgacgggcaggtgctcgttgttcgcgtcgatgccatgaccttgggcgaggcttgctccgacggcgtcgagtgcgccgggccgcatgatggcgagggccagcgcgttgccgttggttttggggcacagcccgttcttgaagatctgcaccttctctggcgcggtgtcgaagacaccgacccgttcgacctgcggctgacgggcgatggttgtgggcgcgtaatccggcagcggaaccttctgctgggcggcgtccacgccgggggcgaccaccgacagattcgcgccaagcgcgtcgagttgggcgaggagcgctgcctggttcgatgcggcgatgccggacaacgccacatatgcggccacgccaagcgcgatgcccagcgatgccagcaccgtgcgggacgcccgcccggcggccccaacccaagccgcatgcatcaaatccgcaattcgcgtgcgtattggtttactcataggagtacgttcactcatatctctcccccagtcagcctttggctgacagcccctcgtcagagggggcttgattcggcttgtcgagttcggtgactaggccgtcttggatgtgcagacgcctggggaaacgtgcggcgatggtctggtcgtgggtgaccatgaccaggcttgcgccggaatcggccgccgtaagcagcaggtcgacgatggtgtggccggtttcgcagtccagcgcgccggtcggctcgtcggcgaagatgatgtccggccgtttggccagggcgcgggcgatggccacacgctgctgttcgccgcccgacaactgggccggccggtgatgcaggcggttccccaatccgacctgttccaacgcctcggcggcccgttgccgacgttcgccgcgcggcagggttgtgtattgcaggcctgtcatcacgttctccaaggcggatacggtggcgatcagatggaactgctggaacacgaagccgatgcgcgcggcccgcaggacgctgcgctgccgctcacccatcgcattcacatccccgccgtcgtatcgcattattcccgaggtcggcatgtccagcgtgcccagtaacgacaacagcgtgcttttgcccgagccggacggcccgacgatggccacgagctcgccgcgatcgatggccagcgatgtatcatgcaatatctccagcaagctcccgtccttgcctggaaacgccttcgtcacatgctccaacgtcagcaatgccccatgctctgggccagcgggggcaaactcgatgtcgttcatgagaccaccaccttgtctcccgccttgaggccgtcggacttggtgatttgcacttgcgcgtcggacaccagcccgattgacaccggcacacgcaccaacttgccgccgcgtaccgcttcgaccgcatacgcgctgccggcgctggcgatcagtgcggtcaccggcacgatcagcgcctccccggtcgaggcatcggcgttcgggatgatgacttgcacggccgtcggcccgaaagccgccacctgcgactggtccgggaagtcgatgcgcgccgatggctgtgtggcttgcccgttgtcgccggtcttctgcccgccctgatcgaccgaggcgagcgtcgtttcgacggtggtgttgtccggcagcacgacctgcgccttgtctccggctttgaacatcgccgcctgcgtggcggtcaacgtggcctgcgcatgcagggtgacgcccgtatagcttgccgggctgacctgtgattggccgagtttcgcgttcaccgccgtgatgcggattggtgcggccgcggccagggccaccgtattcgggtcgaatgtgccggtgaccgcgtcgccggtcaggccgagcgagcgctgccattgccggatcgcctcgcgggtcagccagttgaaatgcggtccgacctcgccgccgtagaatccgagttcctgcaggttctgctccagttgcgtgacgtccgggccgtcggagacgccatcgccgatcgtccgccagaacgggcggtcgccatggaacagcggcacgggcgcgccgtccatctcgtacacctgttcgccggtgttgatctgtttgccggccaccggcagttgggtgattgtgccggaagcggccgcgaaatcggaggcgtcatcgtattgcagactcgcgccgagccgggtctcggcgttgagcacgcccttggtcacctcctgcgtgcgcagcgtggacacatccacctgctgcgatcggccagtctgcccggtcgcggtgacgtgcccggccaacgtccacggcctcaccgccacgcacaccgcggccagtccgatcacggcgatcgccgcgataatcatcgtcacgattctgcggtgtttcccgaatctgcgcgcttccgtccgtgtcatgattgctcctttgtccgttatcggatggccgtctcattgctggggcgcggcttcggtggacgcgctgccggaggtgaattcggagaggactttgttgtagtcatagccgaattcctcggtggtgccggcgaaggcataggagatgttcgcgccatcggtcgggcattccttgaggaatcggcgcagttcggattcgcttacggtgccgggaatcgtgatcgaggtgggcgtatcggcgtccgggtccttgacccagtcgaagcccttcttacgcgcggcctgggcgtaggcgagcgccgcctgcttgtcttccccggaatactggtgttgcggccccatgtccggaatgggctgggtgaagtcggggttcttggcctcgcagtcggcgtattcccgctgtttggattcgtagggtgagccggcgagcgccttggcgtccttgaacaccacccaggtgctgtcgtcttccatcgacgtgtaggcagcgttcgggtagagttgcgggccgtcgtcggatgcgctgaggctgttgccttgggaggcgaccggcttgccgtcggtgccgatcatgcgcagtgcgaccgcgtttttggtcggggcttgtttgcccgagccggagccggacgacacgccagcagccgtacgcgcgtcgaatcctttgccggtcaggcaggcggcgaatcgcttcgccgtggcgtcggtggtggtcgtcgcatcggaccgatcgtcggcacctgagcctgttccgactgccgccagcggtgacgagcaggcgcccagcatcgaagccagcgagagtgcggacgtaagcattgcgattcgccgtaccaggcgcgtatgagtagtggacattaccgtctccattccgtgagtcgattgtgacgacttccatccaatcgccctcaccgtggagcgtcggtaagcggacggattactttcgccttaccgtagaatcgggaaaatgttgggtgatgccattggttcgggaaggctcggaaggggacatgatgcggattctgatcgtcgaggacgaccgcgaactggccgccgcgttggacgacgcgctgcgctacgaggggtacgcgaccagtctggcaaccaccggcgtcgaagcgttgaagatccttgccggcacgaacgtggacatcatgctgctcgaccgtgatctgccggtattgtccggtgacgcggtgatggccaccgtcgccgcgaaccgcattcccgtggccgtaatcatgctgacggccgccgccgaggtcagcgaccgcgtgagcgggctggacctaggggccgacgattacctgaccaaaccgttcgcctatcccgaactgctggcccgtatccgcgccctgcaacggcgcagcgggaccagcaacgcgaccgcagccgtgctcacgcgcggcgacatcaccctcgattccacacgccggctcgtgttccgcgaccacgggcgcacgctcgtcaaactcacacccaaggagtacggcatattgctggagctcatgcgtgcggaaggcggatacgtgaccgcgcacgaactctacgatgcggtttgggatgagccgaccgccgccgacccgaccgacgtgatcaaaaccaccatctattcgctacggcgcaaactcaccgatcgcgaggccatcgtctcgacacgcggggaaggataccggctgcaatgaaggcgacgaacacggcgaaagcatcaggtcgtatacaggcgcttgccggcaaactgcggcccaaatcattccgcgccaaactgacgttggccatcagtctcgtgttcctcatcgccatgggatcggcgaccctcgtgcagaccattgtggtcaacagcatgttcacgtacgccacgacggtcaccgccaaaaaccctgagatgcaggtcgaaagccagcacagcggttccggcaccggcaaacgcccggattccgacccgcgaatgttttcccggggaagcggcacaggtctgaacgatatcactggaacatccagcgtcggcggcgatatgggcgacggtgactatcaggtggaatggggcaaggacgggtcgtataccatcaacaccccgtatggcgtctccgtgtggaaccaggacaacatcgccaccggattgcgcatcagcgcggccatcatcttcgtgttcttcgggatcaccagcattctgatcatctggctggtcacctcgcgcatgtcccggcaactgacctccatcagcgcgcaggcggcggcattggatccggccaaacttgatacgcgcatcgacgtgaatgggccgccatctcgccgtaggccccagttccggcgtgcgggcagacgcgggaccgaggattgggatcatagcacggacagccgcacggacggtcgagctgccggccaatcctccgaagtcacgcagctcggtgacgccatcaacggcatgctcgaccggattcaggccgcatccgaagcggagcggcggttcgtgtccaatgcctcgcacgagctgcgcacgccgattgctgcggtggagaccaatctggacgcgccgttggcccaggggcggttccccgaggatgtgcgaccgtcggtacagcgcgcactggatgccaatcggcgcggcgcgcaactggtgcaggcgctgctgaccttgtcccgtatccaaagcgggaccatcggcggcaagcaggcgggcgatgtgacacagatgagtcccgcatcaacggcacgcacatccacagatttgtacggatgcgtcggcaactcccttgcggatatcgacgatgccgccaccaagcgtcgcatcaccataaccgtgaacaaggccggcggcgacgcggacatgtttctcatcgccgccgacccggcgttgctggaactggcggtcggcaacctgctgcgcaatgccgtcgtgcacaacacggatgatgggtcgatcgacgtgaccgtcgtatcggatgaggatggaagcggaccccgtctgaccgtcacgaacaccacggatgagatgctgccggacgatctgaacgagctgacccaaccgttccatcgcggcgagaactcgcgtatcagcgccgtgcccggcgtggggctcggcctgtccatcgccagtgcggcatgcgaggcgatgggagccaggctggaactcggccaaccggccgaaggcgagttccgggcgagcattcggttttgatggaacactcaggctccccttcaaagaggggagctctattgtttcgcacgcaaaaatcacagacagactattgccttgcgggaaatcatcgttagattggcgagaggaatattgtcaatgcatacgaaacggaaaacatcgtgaccgcaccgaacacgcccgccgaaacctctgaccagctcaacaagcccgccaaatccggcaaactggaggtctccgacctcatcaccatcggcgtgtttgcggccctgtacttcgtgatggtgtgcatcgccacactggtgagcaccctgttcaccagcggcttcggctccatcttcctgcccgccggacgctcgattcgcgcgcgagactcttccttctgctggtggcgaacctcatgctgttcttccatgtagggctcgccacgcaaatcgtcatggtcgtgctgttcctgttgcccctgctggcggccgcccgatggcgaaccgcgttgaacttcggcgtgacc

SEQ ID NO: 2948 - DNA, 11570 bp, Unknown
  R19_24m  MAG No. k141_6110
ccaaggcacgtcgaacggtgattacggcaacgcctatgccgccggccagtgcacgtactgggcgtatgaacgccgtaggcagatgggcattggcacgccgtcctatctcggcaatggcggcgactggtggcgcaacgccccctcgtacggcttgcgcgtggaccacaaccctcaggtcggtgcggcgctctccttcctgcctggtcaggatggtgccgacggtacctatggccatgttgccgtagtcgaagccgtgtatggcgacggcacattccagatctccgaaatgaactggggtggtccgtggaacatgcacaaccgcaccttgaccaatttgggtcagtactggttcgtccactgaccggttggttcggccgatatatgcggttgaagggttcctcttgaagaggaacccttttcgtattcgaggccggtccgtgatatcgtcggatgttgcgttgctacccacgagttgctactcacgagttattgcccacgaaaggaggagacatgcccaaggaaaccggtgagaaactcatcgtccagaacaagaaggcccggcatgactatgccatcgaagacaagtacgaggcagggctggccctgaccggcaccgaggtcaagtcgttgcgcgaaggccgcgcatcgctgtccgaggcgttcatctccatcgaccgccgtggcgagatgtggctggagggcgcgaacatccccgaatacctgaacggcacatggaacaaccatgcgcccaagcgcaagcgcaaactgctgctgcaccgactgcagatcaccaagctcgcccgcggcatcgaagccaagggatacacgattgtgccgctgagcctgtacttcaaggacggtcgcgtcaaggcggagatcgcgctggcccgaggcaagaaggaattcgacaagcgccaggccctgcgcgaagagcaggacaagcgcgaagccctacgcgccatgcgctacgccaacatgcgccactagtcccgtcccttggctcccctccggaggggagccaagggtaggatgtccgcgttgtgggtcatttcgcccacgattaacgcttccgtagcattgcactcctacgctctggaaccatctgggaaacatacccgcccagctgactatccggagagaggaaatccaatgtctctaagcaagggaatacaatccgctgcggccgccgccctgagcgcggccatgctgatcgccgtggcggcctgtggcacgactgacggcaccgacaccgcatccaagagcggcgattcatccaaggactcgtccagcacttcgattcaaggcttcgacaccagcagcatccagaaggacgacgagattgccgcactgctgcccgattccgtggccggcgacggcacgctgaccgtcggcgccgatacttcctatgccccggccgagttcctggccgaggacggcaagaccccggtcggctttgatgtcgacctgtccaaggcgctggccgcagtgttcggactgaaggaaaacaccgtctcctccacgttcgattcgattatcccgtccgtcggctccaagtacgacatcggcatctcctccttcaccgtgaccaaggaacgcatggaggctgtggacttcgtgacctacttcaaggccggttccacgttcgtggtgcagaagggcaacccgaacaaggtcgactcctcgaacctgtgcggcgtgaaggtggctgtgcagaccggtaccacccaggaagaggaagtcaacaaggataacgagcagtgcaaggcggacggtaaggatgccatcgacatccagtcctccaagctgcagaccgatgtgactaccgccgtggcttccggtaaggctgatatcttctacgccgatacgccggttgccggctacgccatcaagcagaccggtgatacgctcgaggccctcggcgaggacgttggtgtgacccctgaggccgtggccgtcaagaagggcgattccaagaccgccgaggccgtacagaaggccatccagaagctgatggatgatggcacgtacaagaagatcctcgacacgtggggcgtctcttccggcgccgtcgacaaggccgagatcaacccgtccgtcgagtagtttcggttactatgaggactcccgttgccctgcggcgggagtctttttgtatatgtatgcactgtagtgtataaatatgcttaaccgttgatcgttgccgttgaagcggcgtaagagagaagaagaaacgattatgcagtccaccaaactgaagtccattatggccattgcactgagctcggccatgctgttcgccaccgccgcttgcggcacctccgacaaggccgatgccggtacggattccgccaagggctccgatgccgccaccatcaccagctacgatgtcagctccgtggagaaggatgacaccatcgccgcactgctgcctgaatccgtgaccaaggacggcaagctcaccatcggcaccaacccctcctacgccccggccgaattcctcgacgccgacggcaagacccagatcggctacgacatggatctcgcccgcgccatgggcaacatcttcggtctcgagaccgaaatcgtctcctccaacttcgatacgatcattccggccatcggctccaagtacgatctgggcatcgccgccttcaccatcaccaaggagcgcatggaatccgtcgacttcgtctcctacttcaccgcaggcatgggctatgcagtggccacaggcaaccccaagaacgtcgatgagaacgacctgtgcggtctgaacgttgccgtcgagaccggcaccgtcgaggaagaggccatcaacaagaccgccaagcagtgcaaggcggacggcaagaaagacatcaccatccagtcctccaagcagcagaccgacgccaccaccgctgtggtgaccggcaaggccgacgtcttcttcgccgattccccggttgtcggctacgccatcgcccagaccgatggtcagctggaacagctcggcaaggacttcgatgaagtgccgaacgccatcgccatcaagaagggcgattcccagaccgccgaagccgtgcagaaggccatgcaaaagctcatggacgacggcacctacactaagattctccagcactggggcgtcgaatccggcgcactggacaaggccgaaatcaacccggccgtcgaatagtcgacaagctgtcgcgaaaattcgaatggggcgcactgtttgtaacacagtcgccccattcgtgcactaaggttcaacgctagttgcaacttgcagttcaggctgcccaacacatccaaggaaccagattatggcgaagaaagaagtcgacggtgagggactgaacatccccaaccgcatcaaggcgttgccggtcaagcgccccggcccgattgtggccgcagtgatcgtggtactgctcgccgcgatgctcattcaaggcttgattaccaatccgcgactggattggcccaccgtctggaagtacctgttcaacgagaacgtgcttgaaggcattcgctataccttggagcttaccgtgatctccatggtcgtggcgatcatcctgtcggtgattctcgccatcatgcgcaaatccatcaatccggtgctgcgcggcgtcagctggttcttcatctggttcttccgcggcacgcctgtgtacacgcagctcattttctggggtctgttcgccgtgctgattcctaagatcagcctcggcattccgttcacctcggtggagttctggagcatcgactccaacgtggtggtcaccgcattcaacgccgcatggattggtctggccctgaacgaggccgcctacctgtccgaaatcgtgcgtgccggccttgaagccgtggaccccggccagaccgaggcggccaaggcattgggcatgaaccgcacgctcatcatgcgccgcatcgtgctgccgcaggccatgcgcatcatcatcccgcccaccggcaacgagaccatcggcatgctgaagaccacctcgctggtcaccgccgtgccgttcaccctcgaactgcagttcgccaccaacgccatcgccaaccgtatctacaagccgattccgctgcttctcgtggcctgcttctggtacctgctgatcacctccattctgatggttgtgcagtcccgcctcgaggcgcacttcggcaagggcttcgatgcccgaccggtgggcaccaagggcaagcagacgccattgccgggtaagaccgacggtgaaccgaaggatgacgtggacaagctcaaccagaccacatttgtcggattgaatgcataaggcgggagcgcgattatgactacgaatgacatcaccagtgttgccccggtcgtgcgcaaggcggctgacggttccgtgattcctgctgtcaaggccgtgcaggtgcacaaggcgtttgggccgctgcatgtgctcaagggcatcgatctaaccgttatgcccggtactgtgaccgtgattctggggccctccggttccggcaagtccacgttcctgcgtctgatcaaccagctggaaaccctgaccggcggttccatcgaggtggacggcgaactcatcggctacaagcacgtgaccaaaaacggccaggacatgctgcagaccctggacgataaggagatcgccgcacagcgctctcgcctcggcatggtgttccagcgcttcaacctgttcccgcacatgaccgcgctggagaacgtgatggaagccccgatccacgtgcagcaccagtccaagaaagccgcccgtgacctggccgtggccgagcttcagcgcgtcggtctgggcgatcgcatggactattacccctcccagctgtcgggtggtcagcagcagcgcgtggccattgcccgtgctctggccatgaagccggagatcatgctcttcgatgagccgacctccgcccttgaccccgaactggtgggcgaagtgctcaacgtcatgcgttccttggccaaggaaggcatgaccatggtgtgcgtgacccacgaaatcggcttcgcccgcgaagtcgccgaccagatcgtgttcatggacggcggcgtagtcgtagaaaagggcggccccgacatcatcgaccaccccaccgagcctaggtttaaggacttcctacagcatgtgctgtaggaaggctgttatattacctcagcactgtcgtgcttcggcgtcgcctacggggagcccactgggctccccgctttacggctccgcctacagcacgtgctgtaggaaggctcgttgttgcaactccaaaagcgtacgctgatgaactcagcgtacgcttttcacgaaggggcatgttccaatcctgcaaaggcggcgggttggattcgctttgcgcaataatcgtccgctaggctggtgagccatgtgtggaatcgttggatacgcgggaaatattgaaacggcatgcggcaagcctttggaggtctgcctgcaaggcctggaacgtctggaataccgaggctatgactcggccggtgtggcgctgaccgcgcccggcatggataaggtggtcgtgcgcaagaaggccggccgtttgaagaacctggtcgaagacatcgagcgcaagccgatgccgctcgccacggtgggcatcggccacacgcgctgggccaccaatggtgagccgagcgacgtgaatgcccacccgcacaccagcatggacggcaaggtggccatcatccataacggcatcatcgaaaacgcctctcagctgcgtttcgacctgcaagccgaaggctaccgattcgcctccgccaccgacactgaggtggccgctaagctgctcggcaagatcgtggacaagattatcgcggacgaaggcaagccagacttgttcaaggctgtgcgccgtatggcccgcatgcttgaaggcgcgttcaccattctggccaccgactgccgccagccggacatcgtggtcggagcccgccatgattcgccactggtcgtgggccttggcgagggggagaacttcctcggttccgacgtcgccgcattcgtggcctacaccaagcgcgccatggaagtcgaccaggatcaggccgtatgcgtgtccgccgacaaggtcatcgtcgccgatttcaacggcaacgtggtcgaaaacccgaagacctacaccgtggattgggatgcttcggccgccgaaaagggcggctgggattcctttatggacaaggagattcacgaagaccctgccgcagtgcagcgcaccctgcttggccgcttcgacacgaatggcgacatcacccttgatgaagtgcgtatcgacgaacacgacttcaaggccatcgacaaaatcatcgtcgtggcctgtggcaccgccagctacgccggccaggtagccaaatacgccatcgaacactgggtgcgtatccccgtggaaatcgaactcgcgcacgaattccgttaccgtgacccgattctgaccccgcgtacgctcgtggtggccatttctcagtccggcgaaaccatggatacgctgatggccctgcgccacgcgcgcgaacaggggtccaaggtgctggccatctgcaacacgcagggtgcctccattccgcgcgaatccgacgccgtgctctacacacacgccggcccggaagttgccgtggcatccaccaaggcgttcgtggcgcagattaccgccgcctacctgctgggcctgtatctggcgcaggtcaagggcgcgatgttccgcgatgagattcatcagatgctcgactccctgaaagacatgccgcgcaagattcagtgggtgctcgacacccagcccaagaccatccaggcggccgccgagcgcatggtgaacgccaactccttcttgttcctcggccgccacgtgggctaccctgtggcgcttgagggcgcgttgaagctcaaggaaatcgcctacacgttcaccgagggcttcgcggccggcgagctcaagcatggaccgatcgcgctggtggacgagggtgagcccgtggtgttcatcgtgccgccgcagcgcggccgcaatgtgttgcacgccaaggtgatctctggtatcgaggaggtcaaggctcgtggcgcgtacatcatcgccgtggccgagcagggcgacccggatgtggaacggtacgctgacgtggtgttctggcgccccgcctgcccaacgctgatgagcccgctggttgacgtggtaccgctgcagctgttcgccatggacatggcaaagctcaagggctacgacgtggacaagccccgcaacctcgccaagtccgtgaccgttgagtaagccacatcggtatgtgattgacgagcctcatattccgtttgagatggacgtgctgtatgaggacgagcggatcatcgtggtggacaagccgcattttctggccaccatgccacgcggcatgtggtatcggcagaccgcgctgatccggttgcgtgagcggctgggggagccggacatcacgccagcgcaccgattggaccgcatgaccgccggcgtattggtgttcgtgcgggattcggcctgccgcggcgcgtatcagatgctgttccagaaccggcaggccgtcaagatctatgaatgcctggcaccctgccggccgatcagcggcccgcgattcggcacgatcatgcaggtcgaaccgccacgcccgttcccattgctgcgccgatcgcacatcaccaaggaacacggcacgatggccgcattcgaggaaccgggtttggccaacgccgaaaccctcatcgagcgcggcgacctctgtttccctcccgctggcgggaggtggcgcgaagcgccggagggtggtccccatccgggaaatcaccccatctgccgctacacactccacccgcgcaccggcaaaacccaccaattgcgcgtccacatgaattcgctcggcctgcccatcgtgggcgacgacttctacccgcgcatccagacacgcccctacgacgatttcagccagccgctgcaattagtggcgcgtgtgctacgattcaccgatccaataacaggcgagaagcgcgaattcgtttcccgtgtgccgcttaggatctgatttcttagggggggggatggcgagaccaatccccacccgtccgaatcactgtccctttcgactggccatccagctcattgcatcgtcgtacaccatcatgatgcgcttgcgatagctatcgatgaattcctgcgcaccaatgctcgcgataacgtcgtgagcgggttgcacggtgctgtcgaatgcctccggcagcctatccaccaaggtgtggaatcgtaaaatcacggattcctcatctaatcccacccgctgtgcgaatcgttccagatgtttgcggcgtaattgaagaagatctcggcgtccgccgatgttcatcgccaaagtggcatttatgatctgcttgccatgccccaaataagggaacaccgaagcaaggtcatagagcggggcaagccgcacggacgcgccatcgagcaatagcgagtagttcttggcgtggctgtctgttgccccgacgagataactggtgaggatgccgtcggtgaaggctcggatattgctttcggcctgaccgggcagaccgtgcttgcgcaacatttccgcatatgcattggacgttgggccgttgtgttcctcgtatttcagcgatgagggaatgcccagcgcttgggtaaagtcttcttggtgcagggccgtcaccgtaccattggcggacactatacggtcataccgctcgctgatgatggctgggaccccatcaaagatgtgaaaagaggtgtgggccacgggtattcccatcgcctccacaatgcgcatggtgatgtgttcgttgaatgcttggtgtggaagggtcggtatgccgggcttgatgatatgagtcgtccgcgcgattccagtggtggagaaccatgatccattgcggttcctcagtgcgatcttgccctgctgtcccgcgaccgaccaatgctcgtctacgcttgcggactggatgcctgtgggggcggctgcgcgtagtcgattcgcgatctgcgaatcgctgattggaataagcgaatcgtcatctatgggcaagtgcgggtcggcggacagccgtaatgcgccggtggcatcgaatccgatggcttgcaacagatcaaatgcgcttgtcgatcgggcatgatgcaatcgcatggcttcatctcgggcctgaggggattccgggaccagggcctcaaggaaattacgcgggatgtcgcctgaatattcggctgcggtaatgggcatggaaagcgatattggtgtgggtgattgcgaccaacgataggaatcgtgatattggaaaataatgctgccatcgtttgttcttcgaaactggccgatgggtgtttcgccgagaaatgcattgagagtgttttcgctcatggtgtcaccattcatagagttcggcgggctgcggggttttgcggacatccagcgacaagccaagctcagtcagagcgctgagaatggtggagaatccgggattggggactcgggcgtgttcaaattcgatcagccagcgacgtgacacgcccagccgttgggccatgtcggtctgactgatgccctggcgttgcctttcatccttgataagccgcgcgtattcggcgatatccatgacaatcatgtgcaaaatatatcacagtatagtaaagtgtgcaatattctgcacatagttggaaatgtgcagaatattgcacaaccgagtcgattggtcggtgcggaattgcctatggatcactggcaggtgaatcactgacaggtaccagtggatgccagcacatgccgctcgtcagctgatgtcgcgcacggaaccgcgttcgatcagttccggcgggattacggttttgacgccgaccggtatcttctcgccttcgcattgacggcggaccatggagaaggcggtggcgccaatgtcgtcaaagcgcagcttcatggtcgtcaggttcaagcgcggaaccatatctaccagcgaatcatcgacgcccacgatgctgacatcctcgggcacgcgcttgcccgctgactgcaacccgagcattgcgccgtatgccatttggtcgttggcggcgtagatggccgtgcagtcggggtcgtgggccaacgccacgccggcctggtagcctgaatccgcgcaccaatcgccgatgtacatgctcggtacgcgtgctcccatttgttccaacgcttctcgccaaccgcgggcgcggctttcggcggcgcgcgaggtggacggtccggcaatgtggtagacggtcttgtgccccttgttcatcaggtaatcgacgatagcggtcgagcagccatactggtcggcgtcaacggtggggcagtggtcggcggcggattcgcagatgagcacgactggaagttctcgcggaggcttgtatccgacgaaatcggagatgcgttcctccggcactacgatgacaccatccaccggctgacgctgcatgcgatcgatggcggcggaaagcgtgcgttccgcaccgtggcgcatggtctggatggtgactgaataatcgtcatcggccgcgttggccacaatagaatcaaggatgcgggcgttgccgaacgcggtggtgttgaacatcaccacgccgatatcctggaagcggccgtgctttagggctcgggccgcataattcggacgatacccaaggcgtttcattgcagcttcgacacgctggcgtgtttcgggtttcaccgcatcgctgccattcgccacgcgggacactgtctgtggcgaaacgccggcggctttcgctatgtcttgcatggacacctgtgttggtctcgacatttcaccctcgcttgactcattaatgtcggtgtttcgtttacaacgcttatcttagggacgcttacggtaacgataacatcgttgtcttcgtgaccattgtagcagagtgactgagaaacccttaattcaacacggtactcaacacgattggataatgttacaaatggtgttatgatgataacgcaaacattttggtcaaccttcgaaggagaggggttgggaatggcttcagccgatatcgcagctgcgcccgtgcattcgggcaaggctcgtgtgaataagcacaaggccgattggcgtggatggaaattcatgtggccttttgcggtggtgttcgtgttcgtgttcatcgtgccgatcgtgtacgccgtttatatttcgttcttcaagaagcagatgatcggcggcaccaagttcgtcggcttcgagaactacgcgcgcctgttgggtgatggccagttctggagcagtgttggtcgtgtggccctgttcacgtgcgtgcaggtgccgatcatgctgtgcctgtcggctttgatggccctggcgttggattcgatgaagctgcatggcacgaggttcttccgtatctcgacgttcctgccctacgcggtgccggcggtggtgtcgacgttgatctggggtttcgtgtatggcgcgaagtacggcctggtgggttcgttgaacgatttcctgggcacggacatcgacgtgctcgcccccagcgtgttgttggccagtatcgggaacatcgtgacg

SEQ ID NO: 2949 - DNA, 31274 bp, Unknown
  R19_24m  MAG No. k141_6237
cacggtcggaatcagggccacgaacagcaggtagacggcaccgacggtgttgagtcggttcatcacgtaggtcaggtagcggctggtggcgttgccggcgcggatgccggggatgaagccgccgtactgcttcatgttgtccgcggtctcgtccgggttgaacgtgatcgaggtgtagaagaagcagaagaacacgatcatcagcgcgtacagggcgatgtaccacacggatgtggtgttcgccaggttggcgttgatccacttgacccaggactggtcggacttgccgaactgggcgatcagggtcgggatggcgaggatcgaggaggcgaagatcggcgggatgacgccggacatgttgatcttcagcggcaggtaggtggaggagccgccgtacatcttacggccgatcatgcggcgcgtgtactgcaccgggacgcggcgctggcacagttcgacgaagtcgacgaagatgaggatgaccacgagcacgcccacgacgatgccgaacttggtccagtcgccgttcttgccgttggtgccgtagccgatctcccacaactgcggcaggaagccggagcagatggacatgaagatcaagatggacatgccctggccgatgcccttgtcggtcacgagctcggccatccacatgatcaggccggtgccgccggtcatgatgaggaccatgaccacgaggttccacacggagccgtccgggatgacctggtcgcagcggtagttgaacagggcaccggagcgggcggtgaccaggatggtggtggactgcagcacggccaggccgatggtcaggtaacgcgtgtactgggtgagcttggcctctccggactggccctccttatgcagggcctcgaagcgcgggatgaccacgcgcagcagctgcaccacgatggacgcggtgatgtacggcatgacgcccagcgcgaagatggacagctggagcatagcgccaccggagaagaggttcaccagtccgatgaagttctcctgggaggcgctgccgatagtggccatgcacttgttcaccacgttgtagtccacgccaggggtcggaatgaacgaaccgatgcggtagacgatgatgatgaacaggacgaagagaatcttcttcctcaactctttggtcttcagggcctggattagtgtcctcacctagatttcctcccaatagcgcgccaatcacgcgaaatacacaaactaacgaatgagcatagtctacagtgcctacttcggccacttcatgtctcgcgaatgttatctgaattatgctccgtcgtactgaacgggggaagcatactcaaaacgatcattgtgttgagactgcttctctgcgctcagaacaacaatttttgagaaaagggaacccccgtccacctattggcgggcgggggttgtacagcctattgcgctccccgtaggactaatcagtcctcggaaacggaaccgccggcggcctcgatcttggacttggcggaagccgaagccttaacacccttgagggtgaaagccacggtggtctcgccgtcgcccagaaccttcaccggagcgttgtcacgaacagcgcccttggcgatcaggtcggtcacagcaacctcgccaccctcggggaagagctccacgagacgagcgatgttgatgacctggaactcgaccttgaacgggttcttgaagccacgaagcttcggcaggcgcatgtacagcggcagctggccgccttcaaagcccggacgcacgtggttacgcttcgtctggcccttggcgccacgaccggaggtcttacccttggagccttcaccgcggcccacacgggtgcggtccttcttggcacccggggcgggcttcaggtcgtgcatctgcaggatttcgttatctgccataatcagtcaacctcctcaacggtgaccaggtgacgcacggcgttcaccagaccacggttggccggggtgtcctcgcggacaacggtcttaccgatcttgttgaggccgagggtcttgacggtggcgcgctgagccggggtacggttcacgatgccgtggtgcagggtaatcttcaggttcttagccatgagtatcactcaccatccttctcttcggcggccttagcggcagcagcctcttcgcgagccttgcgagcctcggcaatgccggcggcacgggcgcgcagcagagcatcgggagcaacctcgtcgagcgccaggccacgacgggcggcgatctcctcgggctcttcgagctgcttgagggcgtcgacggtagcgcgcaccacattaacggcggtggcggagcccatcgacttggtcaggacgtcggtgatgcctgcgcattccatgacggcgcgcacggagccaccggcgattacaccggtacccggggcggccggacgcagcaggacggtgccagcagcgtcgtgaccctgaaccgggtgggtgatggtgccgcggacgcgaggcacagagaacatgtgcttcttggcgtccagctggcccttggcgatggcggccgggacttcacgggacttgccgtagccgacacccacggtgccgttgccgtcgccgaccacaaccagtgcagcgaagctgaaggtacggccacccttgtgggtcttggacacacggttgatggtcaccacgcgatcgagcagctcgtcgccgtggttttcttcacgacggttacgacgctcgccgcgacggccttcaccgcgctggccacgacgacccttgcggtcctcgttgttggattcggtcgccacagtgttctgagtttcttcagccacttgggtttccttcgtttcgttgtcgctcacagtgcaagacctccctcgcgggcgccatcagcaacggctgcgacgcgaccggtgtacttgttgccaccgcggtcgaacacgactgcggtgatgccggcagccttggccttctcggcgatcagctcgccgaccttcttggcggcctcagtcttggtgccttcgaaaccggcgaagtcggcctgaagggtggaggcggacaccaaggtaatacccttggtatcgtcgaccacctgagcaaccatgtgacggttggagcgggtgaccaccaggcgcggacgctcgggggtaccggagatgcgcttgcggatacgcgcgtgacggcgcttgagagctaccttcttgccttttccgagaatagcaacgctcatatcacttaccagcctttccagccttgcgcaggatgcgttcatcggcatacttgatgcccttgcccttgtagggttccggagcgcgcagcttgcggatgttggcggcaacctggcccacgacctgcttgtcggtgccttcgacaaccacgtggttggcgtcggtcaccttcagggtgatgccttcgggcgggttgacggtgatggtgtgggagtagccgaggaagaactcgatgcccttgcccttggcgacggcgcggtaaccggtgccgacgatctcaagagtcttggagtagccatcgtgaacacccttgaccatgccggccatgatggagcgggccagaccgtgcttggcacgggtcggacgcaggtcatcagcggcggtcaggacgatctcgttgccttcaacggcagcggtgatgccttccggaaccacgtaggagtcagaacccttagcgcccttggcggagaagttctggccttcaatcttgacttcaacgccagcagggatggcgatggggagcttaccaatatgcgatgccatgtttcagctctcctttctcaccacacgaaggcgacaatttcgccgccaatgcctcggtcgaggcattccttctgagtcagcagtcccgaagaagtcgagatgatggcgatacccaggccaccgagcggcatcggcagtgagtcggacttcgcgtaacgacgaaggcccggcttggagatgcgcttgatgccctgaatggaacgctcaccgttcggaccgtacttgagggtgacctcaagagtctggccgaccttggcttccttagcggtgaagtccttgatgtagccttcgcgcttcaggatctcggcgatgttcgccttgaacttggagtacggcatatccacggtttcgtgcttggccgcgctcgcattacgcagacgcgtaagcatgtctgcgatcggatctgtcattgtcatttgggcttgttgccctttctcgctatggtttccgccgccctcacgcttcttctagaagcgttcgggccgcggaccttcagcgtcgatgtttaccaactggacttcgtaacgccgggcagttcaccgcggtgagccttctcacgaaggcagatgcggcacaggccgaacttgcggtagacggagtggggacgaccgcagacctggcagcgcgtgtaagcgcggaccttgaacttcggcttgccggccgccttgttcttaagagcggtttttgccatatcagttctccttgaaggggaagccgaggtgcttcagcagcgcgtaagcttccttgtcgtccttggtggaggtcaccacagtgatgtccataccgcgcacgtgatcgatcgaatcaggatcgatctcgtggaacatggactgctcggtgagaccaaagttgtaattgccctggccatcgaactggtggccgttgatgccgcggaagtcgcggatacggggcagcgcgagggtcagcagacggtccaggaactcccacatgcggtcgccacgcagggtgacgtacgcaccgatggcctggccttcacgcaggtggaactgcgcgacggacttcttggccttggtgatcttcggcttctggccggtgatcagggtgaggtccttgacggcaccttcgatgagcttggagtcgcgggcagcggcaccaacacccatggagacgacgaccttctggacacgggcaacctgcatcgggttggagtacttgaactccttctcgagctcaggaatgatctgctcgttgtacttgaccttcaagcgcggggtggccggcgcttcgacagtagtatcggtcatgccagctcctttccggacttcttggcgacgcgtacacgcacggccttgaccttgccgtcacgcgcctcttccttaacagtgatgcccacgcgggtcggctgcttggtctccgggtcgatgaccatcacgttggagcgatggatcggagcctcagtggagacgatgccagcctgctggccctgctgcgttgcacgcacgtgcttcttgacgatctgcacgccttcgacgatcagtcgatcgttggagagcacctgcttgacggtgccttccttgccgcggtccttgccgcggatgaccttgaccaggtcgccgctcttgatcttggctgccatgtcagatcacctccggggcgagggacacgatcttcatgaacttgtgctcgcgcagttcacgaccgaccggtccgaagatacgagtgcccttcggttcacggccggagccgagaatgacggcggcgttctcgtcgaacttgatgtaggaaccatccgcacggcgggattccttgacggtacggacgacaacggccttaaccacgtcgcccttcttgaccgacccgccaggaatggcgtccttgacggaggcgacgatcacgtcgccgatgccggcatagcgtcgcttcgatccgccgagcacgcggatggcgaggagttccttcgcacccgtgttgtcggcgacatgaagccgcgtttcctgctgaatcattgattctccttagccgagctggttctccccatttaccggggcatcgtggttgcccataatgccccggtaaatggcgagccttgccgaactttacttacttggcgcgctcgatgatggattcgagacgccagcgcttggtcttgctcagaggccgagtttccataatactcacgaggtcgccaatgtgggcgtcgttgtgttcatcatgggccttgaccttgctggtggaacgaacgaccttgccgtacagcgggtgggtcgaacgctgctcgagctcgacggtaatcgtcttgtccatcttgtcggacacgacgtagccgcggcgaaccttacggaagttacgctcttcagccataatcacttctccttggattcggtagcggccggctcctggctgatgccaagctcacgctcgcgaagcacggtgtacatgcgggcgatgtcgctcttgacagccttgagacgggcggtgttctcgagctgaccggtggcgtgctggaagcgcaggttgaacagctcttccttggacttcttcaggaagccttcgatttccgcgttggtcttctcgttgagattcttgatggagtaatcagcggtaccgactgccatcagatatcaccaccttcacgtgcgataatgcggcacttcatcgggagcttgtcgatagcgcggcggagggcttccttagcgacgtcctcggacacaccaccgatttcgaacatcacgcgaccagggcgcacgttcgcaatccagaactccggggcacccttaccggaacccattcgggcaccgagcgggtgcttggtcagcggacgatccgggaagatcgtgatccacacgcggccaccacgcttgatgtagcgggtcatggcgatacgcgcggcttcgatctgacggttggtcacgtaggccggggcgagggactggatgccgaaatcaccgaagttgatctcgttgccgcccttggacatgccagaacgcacagggcggtgctgcttgcggtacttagtcctcttggggataagcattcttgctcactccttcgtttctgcagccggagcggcctcggcgggagcctcagccttgggggcttcgacggcctgcggggcggcggaacggttgccacggcgcgggcggcgatcgccaccacgacggcccggacggttgttctgctgagcctgctgctcttcgaactcggattcggtcatgtcgcccttgtagatccagaccttgacgccgatacggccgtacgtggtcttggcctcgaagaagccgtaatcgatgagggcgcggagggtctgcagcggaacgcggccctcacggtagaactcggaacggctcatttccgcaccgccgaggcggccggagagcttgatgcggatacccttggcaccggcgcgcatggcgtcctgctgggccttgcgcatggcacgacggaaggtgacgcggttggtcagctgctcagcgatgccctgagcgacgagctgggcgtccagcgcggcgttcttgacctcgaagatgttgagctggacctgcttgccggtcagcttctcgagcttggcgcggacgcgctcggcctcggcgccacgacgaccgatcacgatgcccggacgggcggtgtgaatgtcgacgcggacgcggtcgcgggtgcgctcgatgacgatgcgggacacgccagcgcgctcgaggtccttgctcatctccttgcggatctgatcatcctcaagcacgaagtcgcggtagcgttcgccggccttgttggagtcggagaaccacttggagcggtggttctcagtgatgcccagacggtagccaaacggattgatcttctgacccatctttagcgggctccttccttgttagccacgacgaccgtgatgtgggaggtgcgcttgttgatacgagcggcgcggccctgggcacgagcgcggaagcgcttgagggtcacaccttcgtcaacgtaggtctccttgatgtacaggtcgttctcgcggaacggctcgccggccttgtcggccttcacgcgagcgttggcgatggcgctctccagggtcttgcggaccggcagggccgcagcctgaggggcgaacttcaaaatggtgacggcttcggtcgccttcttgccgcggatgaggtcgaccatgcggcgagccttgcgcggcgtcacgcggacgtgacgagcgattgctttagcttccatgttctattccttatccttagcgacgggccttcttgtcgtccttcacgtgacccttgaaggtcttcgtgggggcgaactcacccagcttgtgaccaaccatggcctcggtgacgaacaccgggacatgcttgcgaccatcatgaacggcgaaggtgtgtccgatgaaatcaggggtgatcatcgaacgacgggaccacgtcttgatgacgttcttggtgcccttctcgttctgctcgtcgactttcttctgcaagtgggcgtcgacgaaggggcccttcttgatgctacgagtcatcttctcgatactcccttacttgcggttcttgccggacggacggcgacgaacaatcatcttgttcgaagccttcttcggacgacgagtacgaacctcgcccttgccccacggggagaccggcggcttaccaccgcgggtacgaccgccgtgcgggtggtcgaccgggttcatggactcaccacgggtgatcggacggtggccgatccagcgggcgcggccagccttgccgagctgaatgttggcgtggtcctcgttgccgacctcgccgacggtagcgcggcagcgcgcgtcgacgttgcggatttcgccggacggcatacgcagctgagcgtaggcgccatccttggcgacgagctgaacggcagcaccagcggaacgagcgatcttggcgccacccagcgggcggagctcgatggcgtgaaccacggtaccggtcgggatgttcttcagcggcaggttgttgcccggcttgatatcagcctgagcaccggtctcgatgacgtcgccctgcttgatgcccttcggcgcgatgatgtagcgcttctcgccgtctgcgaagtgcaggagggcgatacgggcggagcggttcggatcgtactcgatctcggcaaccttggcgggcacgccgtccttgtcccaacgcttgaaatcgatgagacggtactggcgcttgtggccgccgccgcgatgacgggaggtgatacggccgtaagagttacgaccgccggtcttggacttcttgcgaaccagcgacttctcaggcgtagaacgagtcagctcggagaaatccgagacggacgcgttgcggcggcctgcggtcgtcggcttataaacgcggatagccataatgtagttcttcctttaacttttctcggctagccttcagttaccaaagatgtcgatcgtctggccctcggcgacggtcacgatcgcacgcttctgggaagcgcgctggccgaaaccggtgcgagtgcgctgcttcttgccagcgcggttgagggtgttgacgttcgtcaccttgaccttgaagatctcttcgattgcctgcttgatctgcaccttgttcgcatccggagccaccacgaaggtgtactggccacggtcggaagcggcgtagctcttctcggagacgacgggcttaagaatcacgtcgtgagcgggcttgtgaatagcgaccatctaaatcaggcctccttcggctcggtcttggcagccacgaaagcctcgaaggcttccttggtgaagaccacgtactgcgaggtaatcacgtcgtacgtgttgagctgatcgacgaaaatcgggtgaacggtcgggatgttgcgcacggagagccactcgttgatgttgtcgcgagtgaagacgaccgtggtgaacttgtccgcggtgatcggggccagggcggcgacagcggccttggtggacggctcggtgataccgaactccaccacggcaacgcgaccggcgttggcgcgatcggacagggcgtagcgcagagctgcggccttcatcttcttgggggtgcgctgagagtagtcacgcggctgcgggccgaacacggtgccgccgtggtaccactgcggtgcacggatggagccctgacgagcacgaccggtgcccttctgcttccacggcttcttgccgccgccggaaaccatgccacgagtcttggtggcgtgggtgccctgacgagcagcagcgagctgagcggtgacaacctggtggatcagcgggatgtgagcctggacatcctcggcggaaacgccgaagagagcctcaggagcttcaacggtgccggtggcctggcccttggcgtcggtgacgttcagagtaacgtttgccatggtttatcaggctcccttcacagccgagcggacgagaacgatgccgcccttggggccaggaatggcgcccttgatggcgaggatgccgttctcgacatcagcggagacgacggtcaggttctgggtagtggcggtcacatgacccatgcggccggccatacgcttgcccttgagaatacggctcggagtggcgcatgcgcccacagaaccgggacggcgctcgttcttgtgagaaccgtgagtacggcggtaggacttgaagccccaacgcttgatggtaccggcgaagcccttacccttggtggtgccggtcacgtcgacctcagcaccctcttcgaacaggtcagcggccagttcctggccagcctcgaactgatcgacgtcgtcggtgcgcacctcgacgaggtggcgacgcggggtgacaccggccttggcaaagtggccagccagcggcttggtcaccttggtggggtcgatggcgccgtagccgagctggacggccttgtagccgtcagattcctcggtcttcacggcggtcaccacgttggtggacacgtcgacaagagtgacgggcacgaagaagccgttctcgtcccacacctgggacatgccgagcttcttgcccagcagagccttgcgattagacataatgcttcctcctcccttacagcttgatttcgatgttgacgtccgcaggcagatcgatgtgcatcagggagtccacggccttgggggtcgggtccacgatgtcgatgaggcgcttgtgagtgcgcatctcgaagtgctcgcgagaatccttgtacttgtgaggagaacggataacacagaagacgttcttctcggtcggcagcggaacggggccaacaacagttgcgcccgcgttcgtcaccgtttcgacgatcttcttcgccgattggtcgatgacctcgtggtcataggacttaagcctgatgcggattttctgtcccgccattgccgtccgccctttctagcgatgttcgttgtactgtttaccaacctgcttctagggcaccggcgcgcatggcctcccttggacatacgtcctctggcggtcatccgacatcagtgcgcggtttccggctgtcacttcacttgaagtggctcccggcccgcgctcgcttttttaattccaatttgcgagcccaaatcaggcaacttgtttattcaagcattgaggtgggacagcgcggaggaattcgcgcgtgtcgcgctcatgccgttcgtattacctcgcggcatagccgctcggcgtcgcctaccaacatccttctgagacttacctatatatagtggcacagctcacgttggcgaatatggattgattaattgagttggacggtaacgcgaattactcttaaggctcgtgacacaatcactggcaaagaacatcaaacctattcgtgagcacggcgccaacgtgttatatcagcacggcactttggccttactcgtgccggggctgctggaaggcaccaccaccatcggcgaattgctcaagcatggcgacaccggcatcggcaccggcgagggcttggacggcgagctcatcatcctggatggcgtggcatacaagataggccaatccggtgtggccgaacgcgtgccggacgacttcaccatgccattcgctaatagccatcgcgcggccttccagtaccagtgcgagcgtcatgatatcggcctagaagagctcaacgaaaagatcgtcaaggcgaacggccgcgcgaacacgttcttttcggtaattgtgcgcggcacgttcagcttcatcaagacacgcgcggtcatcaagcagcaggcaccctaccccacgctggtagaggtggccgaccggcaggccgtgttcctgcgccacgacgtcaagggcaccatgctcgggtacttctcccccgtgatgtttcacggcgcggctgtggccggattccacgagcacttcctgtccgacgacaagacgttcggcggccatgtgctcgatgcggtgctcgagcgcggcaaaatctacagtcaggtgttcgataccttggtgcagcatctgccggtggacgaccctgattatcgcaaccacgacttcagccaagatccgatagccgaggccatttccagcgccgagggcgatactcaacgagattagtctcacataaacacaatgtgagccaaatgaacatttccgaacaatcgcacacgttgcataatggcggaagcactggcttctcgcacttcctatgttcgattgtcgcaatgcaggtctcacatctttcttattgagaaccattcgctgcgatatcatgacagatatgacttcccgccgcaagactcttaaacgcgattggttcgacaaccaacctggcgcatgggtaatggttatgctgcccgctgtggctggcttctttatcggcgggcctaatcttgatacgctttggctgttggcgacgtgggccgtgtgctattgcgtgcagttcagcgccgcgcactggttcaaagcacacttttcacgccgttatctgccgccgatgctcacttatgccgtagcgctcatcgtcatcggcttgccattcctgattacgcataccggcatactgcgttgggctcctttatatatagtgctggttgcgctgtcgatgctgtcctcgtggctgaggaaggagcgctcgctgtggggcaatgccgtgtcggtgattgccgcatcggccatggccacggtgatcgcgtcgtttggcaacgctgttgagacggcatgtgttattcccatcaacgcagcacatgcctcgtgcgcagccgctgatgtcaccgccgcacgcgccgcgattcggaatatgccggatttgagccagatattcgaccttcacgcctggtggcctgcgggttcattgcccgtgaacgggctgattgccaccgtgctgtttgcgctgacgcagtatgggtcggttttggtggtcaaaaccatgatccgggaacgcgggaagcgttcgtacgtggcggcttcgtgggtatggcatgtggcgctattgctgctagccgccgtgccggctggacgcagcccgtatctgattgcgatgactgtgctgctgttggcccgcgccgttgcgttgccggtggttacacggcgcacaaccttgaagcccgtggtgaccggcattaccgaggcgtttgccagctttattgcttttggctgcattattgcggtgatttagcgacgctcagcgattccatggggcggtaattccctcatggggcggtaattagcccatggggcggacggtaaaattttaccttccgcagaatagagccgttttcgtacaccgccccatggggttttcaccgccccatgggcaagttaccgccccatgagtaggttaccgccccatggaggcacctgccggctgagggagcgccacatatgcaaaggagcccggcccctgtaatggggtcgggctccttgtgtccgctatgcagccactaagctgcaacaccgcggttggtggctactgctggtgccagcagccgccaaccgcctgcaatcagcgctcggaggcttcctcagtggcggcctcaccctcgcgctcgatgcgtagcttgtggccttccgcctgggagacgccgtagtaagcaccgacggcgatgtccttcatgtcgttgatcagcgggatgcgcgggttggccggggtgcactggtcctcgtaggcgcgcatgccgatctgatcgagcacggaccagaagtaatcctcgtccacgccgcaatcctggaagctcttgttcataccgagcttgttatcgcggtagtcctcgacagccttcgccaggttctccacggcttcggccggggtcttgccggtgtcgatgccgaggttgcgggcgatgtcctggtagcgctccggggcgatgtacttgttgtacttcggccaagaggtgggctcctcaggaatctggccgttgtagcgaatcacgtacggcagcaggatggagttggtacggccgtgggcgatgtggcacagggcaccgatggtgtgggccatgccgtggcacatgccgaggaacgcggagccgaatgccatgccggccatggtggcggcgttgtgcatcttctcctgagcgtcggtcttggccaggccgggctcgccgttgacggactcagccaggttgtcccagatgagcttggccgcgtgcagggccatgccgtcggtgaagtcgttcgcgtacacggacacgtatgcttccatcgagtgggtcagggcgtcgaagccggcgtcggaggccagcttgcgcggctgggtgcgagccagcaccgggtccacgatggccacggacggggtcagcgcgtagtcggtgatcgggtacttgtagccggtcttgtgatcggtgatcacggcgaacggggtgacctcggaaccggtgccggaggaggtcgggatgcacacgagcttggccttcttgcccagcggcgggatcttgaaggcgcgcttacggatatcgaagaacttctcgcgcacgtcggagaaggcgatttccgggtgctcgtagagcagccacatgatcttggaggcatccatcggggagccgccgccaaccgcgatgatcgtgtccggctcgaactcctcgcgcatcatctccgcgcccttttcgacggtctcgacggagggctccggctcgacgtagtcgatgatgcggaaggtcacacggttggagcgggcgcgcagctggtcgatgaccttgtcgacaatgccaagctgctccatgaccttatcgcacacgatgacggccttctcgatgccgtacatgtcgcgcaggtacttgatggcgttcggctcgaagtaggtcttggccgggatcttgaaccactgcatgttgttgttcctccgagcaatgcgcttgatgttgacgagattcacggcctgcacgttgccggacaccgagttgccgccgtaggagccgcagcccagggtcagcgacggggcgatggcattgtagatgtcgccgatgccgccaagggaggaaggctggttccagatgatgcggcaggcgtgcatacggacgccgtactcacgcacgagctcctggttgttggtgtggatggcggcggtgtggccggcacccagcttgagcatcttctcgcacatctcgaaggcctgctccttgttgtcggccttgagcacggcctgcaccggagcgagcttctcgtgggtcagcggctcgtcgtcggagacttccttgcactcggcggccagaatggtggcgtcggccggaatctcgaagccagcagccttggcgatgaactgcggggacttgcccggcaccacggagttcagcacgggcttgacgccggaaccggcggtgcagccgaacatgtactgctccagcttggccttctcttcggcgttgacgaagtaggccttacggaccttgagctccttgatgagctggtcgtagacgtccttgtgggcgatgatggcctgctcggtggcgcagatcatgccgtaatcgaagtgcttggagagcaccagatcgttggcggcacggacgatgtccacatcggaatcaacataggccggggcgttgccggcacccacgccgagggcgggcttgccggaggagtaagcggccttgaccatgcccggaccaccggtggcgaggatcgtggccacgcccgggtgctgcatcagcgcgccggtggcctggatggacgggtgctcgatccactggatacagttctcgggagcaccggcctcgatggcggcgtcgcgcacgatcttggcggcctcgacggagcacttctgcgcgccggggtggaagccgaagacgatcgggcagcgtgtcttcagggcgatgagggacttgaagatggcggtggaggtcgggttggtaaccggggtgacaccggcgaccacgccgacgggctcggcgacctcatcgatgcccatcacgtcgtcttcgcggatgatgccgacggtcttctggccggccaggtagttggtgacgtgctcacaggcgaagatgttcttggtggccttgtcttccacgagaccacggccggtctcgtcgacggccatcttggcgagaacgaggtgcttgttcagagcggcgatggaggccttggcgacgatacgatcaacttgcttctggtcgaggttctcgaattcgtcgagagccttcttggcgcgggcaaccagcgcgtcaacttcggcctcagctgcggcctgcttctcttctggggtcggattggcagcttcgactttcttctttgcttctgccacttggggtcctcctcgatcttcttggggtattatggcaaagttctgggccatcgcctcgtcacctcagttgcaccagcgggataccgcctcagtaaccgaaaatgaccggtgatgcgttgtcacattgcatatgtgacttgagtcacaatataccgaacggtccggcgcgatgcatacgcacaaaatcgacggcgtttcacgtgcgatattgaacagtttttgttaagagttgtgcgaaatatcgaacaaatcctcactttattcggcgatttggtactttttgttcactttttaccgaaaatcacatgcttgcaaacaacgcaatccgacaactttcttaaatcaagtttccaaaagtactcattttccccacatttctagaaaattggtttaaaaaagtgcccaaaatcgcctacaaatatacgattgttgcctcataatctccgcgtcgaggcacatgaaagccactttcataaagtatacttacatatatctcatcgcacaaaggggtaaatatgagggcaatgccatcgaccgcagtgaaagcgcacaaccgcagtgccatgacccagtatctgtatggccatagccatgtcaccaagcaggaactggaacgcgaactcggcctcagcctgcccaccatcacccaaaatctgcgcgccctagaagatgacggactcatccgcaaaggcgaactgcaggattccaccggcgggcgcaaggcgcaaaattatgagttcaatcccgatcatcgcactgccatcggcgtagtgatgcggtccaacgaactgcgcctgtgcgcgattaacctgtacggcaacgtcatcgaaaaacgcaacgatgccctgccttaccgcaacaccaacgtttactaccagcgtatcggcggcatcatcaacaacttcgcctccgacgtcgaaaagaagcacggcaaagtgctcggcgtctcgttcgccatccaaggcatcctctcccccgacgccaccaccatcaccttcggcaccattatgggcaacacggggcttacgctcgaaaccatcagccagtcggtccattacccgtgcatgatgatccacgattccgatgcctccgccatggtcgagctatggttcgactccacgctcaccgatgcggtgtgcgtctatctggagcgacgcccgggcggcgcggtgatcgtgggcggcaagctgtatcagggtccgaatatgtgcaatggcgccatcgaacacatgacgctggtgccgggcggccgcgaatgctactgcggccagcgcggttgcatggacacctactgctcgccggagaccttgcccgaggattacgaaagtattcccggcttcttcagcgtgcttgagcagggtgaacggcatcatcgcgagcgcatggacgaatggctggattacgtggcgcaggccatcgtcaacgcgcgatccatcatcgcgggcgacgtgattgtcggcggtgaagcagcccagcatcttgaagacagtgacatcgaggatctgaaggcgcgcgtcatcgcacgcagtccgttcggcaccgaccatttcaatctgcgcaagagctactgcgccgaagaccagaacatcatcggtgccgcattgcgattcgccgagaattatctcgacgatatctgtggtgctgcggaacgcggcaggaaatcaagggcttccaccagaagtgacaacacgtctacaatggaggtatgaaaaacccaccgttgcatcgttacgccactcgcccagggctgtacttcactgacgacggtggggctgacgtcgttgttcgttccgaaactgccgatcaggtttggctgtgtgtgctggagcccattgacgagcccggcgccttcttccaagacgccatccgcctgttcgaagacccgaacgcctcgttcatccagcagatccatgagtttccggtgtgcacgcgcattatcgaacatttgtatctgcgcgagaccctgttccgcatgaccggaccgaactacggcctgtggtacgtgcacctgcccaaagcatgggacggcatgcgttatggctaccgcgtggacggcgcatgggacccgaaacacggcgtgcgcttcaatccatacaaattcctgcttgacccgtatggcaagggcatcgacggctccatggagctcacccccgccgccttctcctatgaatgcgatgtcgtggatcgcaaggtaaccggctcggcatacggtgccatgagcaccgtagactcgctcggccatgtgccggtatccgtggccatcgacgatcgcgatatccataagcatgagggcgacccgcagcacccgcatgtgccgtggcgcaaaaccgtcatctacgagatgcatgtcaaaggcttcaccgccaacgcgccgtggctgcccgaagcgttgcgtggcacctacgccggactcgcccaccccacaacgctcgcctatctgcagggattgggcatcacctccatcgaactgctgccgattatggccaagcaggacgagctcttcctgcaagaacacggccacaagaactactggggctactccaccctcagctacttcgcccccgaaccctcctatgccaccaaagcagcccaagagaagggcgcggccgccgtgcgccaagaagtcatagacatggtgcgcgcgctgcacgaggccggcttcgaagtcatcatggacgtggtctacaaccacacatgcgaaggcggcgtcgaaggcccgacggtctgctggcgcggcctcgacgacctggcctactatcgccatcaaaaatccaataccggtcgactcgaagacaccaccggttgcggcaatacgctggacttcaccaacacgcatgtggtcacctttgccatcgactcattacgatactgggccaagcgtatcggcatagacggtttccgtttcgaccttggcgtcacgctggcccgcctggaaggcgaattcacccatcatcacccgttcctctacgccctgcgttccgatctgctgctgggcaacctgaagctcattatggagccgtgggatctgggcaacctcggctggcgcaccggccaattctccgtgccgttcgccgaatggaatgaccgcttccgcgacacggcccgcaccttctggcttgaggatgtggacggcggctccgatttcggtcgtatcagtttgcaggagatggccacgcgactctgcggctcggccgatctgttcgccaccgaacccgggcgcggcgctccggcctccatcaatttcgtgtcctgccacgacggtttcacactgacggacctcaccagataccgctccaagcacaatgaagccaacggcgagaacaataatgatggctcgtcggtgaaccattccgccaatttcggcgtcgaaggcgtcaccgatgatccagacgtcatcacggcacgcgaacaggcggccatgaacatgatcggcatgctgctgctctcgctgggtacgccgatgatgctcgccggcgacgaattccgcaacacacaggacggcaacaacaacgcctactgccaagacaacgacatcacgtggctgaagtgggattggatgtattccaccaacaagacacgcgaaatgcgtcgcctgaaaaccgtgtctcgactggtggcgctacgtaaatcactggacctgtatcaccacgaggacttcttcacccgactgacccaactcggcctactcaagccctcaagccgcgtgcagtggttcctgcccgacggcaccacgccgatggagcgtgactggttcgatctgggcgtacgtagcttcaccatgcgattgctgtccaacagtgaggtggacgtgtgcattgtggtcaacggcaccgctgacgaccgcacattccacctgccgccagacactcactggacgcctaaatggtgctcggccgaaatcaacggccgccgagccgggcatggcattcaggtcgaggaatgcgatttgaacgatgacaccaccgtttggacgcagcatgtaccggacgccagcgagacggtacgcacgctggtcgaagaagtggccatgcagcgcacggaatcctcgactgaggatgaagcggataccatcgaattcgcgatgccagcaacggatcacgccgcaaacggcacctcgtccgcgcctcgggatgaggtatcagctgatatgcctgatgcccctgtggatgatacgccggacactcccgtcgacgacaatgtctggaccatgccggcgctgagcatcacgctgatgaaacaggtgtgagtcacactcaaaacagcacgacacaaacacaaaggctctccgcggaattccacggagagcctttgtatgctcggtacaggacaagcgaaattaacgcttggagaactgcggggcgcgacgtgccttgtgcagaccagccttcttgcgctccacgacgcgagcgtcgcgggtcaggaagccagccttcttcagggcgacgcggttggcatcacgatcgatggcgttcagagcgcgggcaacgccgaggcggatagcgccggcctggccggtggtgccgccgccgtcaacgaggacgatagcgtcgaacttgccttcgagcttgagcagaacaatcggagagttgacctcacgctgcagcagcttggaggggaagtactcctccagggtgcggccgttgatggtccacttgccgtcacccggaaccagacggacacgggcgacagcctccttgcggcgaccggtgccgtagcccggctcgatcgcggaggtgccggtgccagcgccagcgttggtctcggtggtgtagttggtgagctcctcttcggtctcgacaacctgggagtcgttggtgttttcagccatgattcttatctcctctcaggtttcacttagcctgctgcgagacctgagcgatctcgaagacctggggcttctgcggggtgtgcgggtgctcggcgccgcggaagacacgcagacggtcgagctgcaccttggccagacggttcttcggcagcatgcccttgacagcgttcttgatgatgcgctcggggttcttctcgagcagctcggcgtaggagtcacgacgcagaccaccgggacgaccggagtgcgagcagagttccttgcccatcttgttgccagtcagagcaatcttgtcggcattgatgatgatcacgtggttgccggaatcggcgtgcggagcgtaggtcggcttgttcttgccgcgcagcaggattgcagcctgggtggcgagacggccgagcaccacgtcggtggcgtcgatgacataccagtcatgagtcagatcagctggcttcggagtgaaagttttcactggattaccttttctatattgtgttccgggtctcagctgcttggcgtggcttggtcagggccgcatccaagaggcatcgaacctcattatccgtgggctccctgaaagtcctcgatggcgagtgggatagcgctttgaaggaccccttagggaaacacaacaatccactagtatatcgccgggcttgacatagggcaacaggggacactccattgggtttatggcttctcttcccctatttatggtttctcttccacccacttcggctaaccgactcgcctacggtgaggcaattccctgccttctctcagctatcgcttcgttcaggcctcgtctacggacagtccactggactgtccgcttaacgactcggctcgtcagagggaggtaaagtgggtcaggaattgaagatttgggcgaagcgttggacgccgggggtgtcgaagagggtttcgagcggtaccacgttgcccttggcgtcggccagcgggatgcgccagttcgggtattcgttgttggtgcccggctggttctgcgcgcgcttctcccccaccgcgtcggtgatcgaggcggcgagcagcttgcacggcgaacccttcagtgcgcggtacagcgcgtcgatgatatccgcctcgtgatcctcacgatgttcggcgaagtcggcatcaagatagccctgctcgaccagcatgaccagcatcgcatcctgctcggcctttgcggaggcttcgaattcctcagccgggccggtcagcaagcccagacgctcacgaatcttgacgtgctcgtattccaggtaaccggcggtcggcggcaaatcgtgcgtattcacggaggccaatgcgcacggacgccactgggagggggcgcggaacacgccgtcgcactgctcgaaccattcaacggcgcaaccgagaataccgtggctcgacagggaatcggccacatggtccggcaccacgccgaggtcctcacctacgaccacgccgccggcgcgagaggcctcgatggccagaacgcccagcatgatgtctgagtcgtagtacacataagcgccatccatagccgaccggttctcgggaatccaccacaggcggaacaggccgagaatgtggtcgatgcgcaccgcaccggcacgggcgaacatgccatgcaccatattgcggtaggtctcgtagccggtggcctccagattgatcgggctcagcggcggctggctccagttctggccttgctggttgaacatgtccggcggtgcaccgaccgtggctcccttggcgaagcgctcgggattccaccacacgtcagcgccggaggggtgcacgccgacggccatatcggacatgatgccgatatgcatgccggcgtccttggctgcctgctgggcggaggacagctgctcggcggcaatccattccagccagcggtagaagtccaaagtgtccgggtactgcttgcgcagattggcgatttccggggagttgcggttgaacttgcgctcccagttgctctcctcgccgttgggtgctccccacttgtcgtagcacaggcaccacgtggcatacgcctccaagtcggaaccgcagtccgccttgaattggtcgaacgcgctttggcgttcggcggtacggccggccttgaagataatccacagggcgtgcatcttgctgcgccacatggcgtcacggtcgatgagctgggaatcaccgttcagcggttcggtgtcggcatgcagtccgtcgacggcgttcttgtcgcccgcgctgagcgtggcatattcggcgatcgcctcggggcggatgtacgtgaagttgatcaggcgacggcttaccggcagatacggcgacggggtgagcggggacaccggctcggcggcatgtaccggattgatgagcacaaagtcggcaccggtcttctgcttggcgtccaccagcatggtcttcagatcctcgtaatcgcccacgccccaggagttggaggagcgaatcgagtacagctgggccatccagccccacagactgccgcccttcatcgggtcaagcagatcgacgcgatcaggtgcactgatcaaagtggcgtcttgcacacggtcggcgaccttgacgtgcagcgtatggtagccaatcggcagatcggcgggaatgaccacagccgcattcgaaatgaacgtgccatccaagtcgtaggcctgggatccatctccaggaccaacttcaacggtgccctgatatggctcgccgttctccagcgtgatgctcgccgaaggcacgtccagaatgccggtgttcaccagcacccggtcctcgctaccggcgatatgcagcacggtgggtgccaccaatcgggagtaacgctcgttcagaatgcgtcggatggcgatgagttgggcgttctcgctggaggcgtcgatgcccagcgctgccagcacctcgatcaggacgtcatcgtctatctcgtggtagtcatggctcatgcccacataactcgtgccgacaccgaccaacttggccagtcgaatcaacggacgggccagacgctcttcactctcggtaatctcactcatagccccagtctaacgccgtttgattgcgccacaccgtaagcaaaatgccgtgattccgccaaattatgtactttttaccctcacatagtgagatgtgagcgctcacaatggtgaatagagggtgattgccggccaaatttgcacggcaaaacacagcaatagtgtgcttagcggcggctttccacggcgtgccgcacctcggccgaggggtcgttggccaatttggcaagcatcgcttcggacgtattggggttcagcgccacggcacggcggaccatcgaggaaagcactgccggtgctccctcttcggattcggtgccaagtacgcccaagaaatccaatgtctccgcatccgcagtggggtcctgcgcgccctcaagccgcatcttccagctggtgcgcttgtttttcaacgccgtatcccggaccgcaggtaccggatccttggtcaggcggccgaccagccaattcttgtcatccccgttggcggccacggcttggcgcacggacggttcggggtcttcggagagtttgaccaatacgttcgggaacggcatggtgtcggcgaggaacacgcgatcggccaccggggtgtgcgggttgccggccacagcctccaaaagtgcggtggcgcgggagaacgccgcctgatcggcacggtcaggcaacggccgacgggcgaattcggacagttcggccgggtcggtggaatgacgcagacgttcgtatgtagcggtcagcggttcgaaatccaccggagcggcggactcggctgcggcctgcgcgccttggtcctgctgctgggcgtccgtgtcggttgcggcctcggttgcagcctcagttgcggcctcggtgggctgggtctgctggctggtggtgttctcgtcggtcatgatgcccagcttagtcatacaggcgtcacgcgagcggaaccggaatgttgaccacgtcaatcggatccggcaccaccgcggcattgaacgcttcccgcacacactcctcgaatcgcgcgcaatcatcctgcggcaccaccgcagtcaactcgacgttcaccgcatacgattcatcctcctggtcgccaccgagctgcgccaggatctgctggaatcgggccaactgcgggtattcgagacggacccggtatcgcttggcggtcatgatgcgggcggcgcgggcggctttcatcgccaatgatgcggcggatgagtacgcgcggaccagaccaccggagcccagcagaatgccaccgaaatatctggtgacggcaaccacgcaatcggtggtgccggactgcttgagtacgtcgagaatcggcttgccggcggtaccggacggctcgccgtcatcgctcatgcgttcggacagtcgcccatccgcgcctccgcacacggcggcatacgccacgtgtcgggctttcggatgctgctcgcggatcgcggccacgaacgcgagcgcctcgtcgagcgtatcgacatgggcggcgtcgccgatgaattcggactttttttcgacgagcgaatcgtgggcgggatcgtcggacgtgttgagaatcgtctgcataagcgtgttccggtggtcggctgactgggtgttcgattgagcgcgaggctagacaggactatcagtgttcggagacgacgacgttatagtcctcgccggcgaagtaggcggtcaggcaggcgatcatctggcgggtgagctccttgaacgcgccgtcggtacgccagccgacgtgcggggtcaggacgatgccgggcacatggcagatggcgtcgtcggcagtcagcggctcgtggtcgaacacgtcgagtgcggcgggaacatcgcccttttgcagtcgggcaagcagcgcaccggattcgatgacttcggagcgggcggtattgatgaacagggtgccgggcttcacatgcgcaaggttctcggcggtgacgatgccgcgagtggcgttgttgagcggcagatggacggagatgacgtcgctggtttcgatgagctcgttgagatcgtcgaccggagtggcgccggagcgttcgaaatgctcgggcggcacatgcgaattccatgcggcgacctccatgccgaaggcgcgggcgatgccggccacggtggcgccgatgccgcccagtccgatgatgcccatgcgacggccggcgagttgcagtccatcgccgccggcccacgcccagttgccggccttgacatccttatcgagttggccaacgcggcggatgagctcgaacagaagggcgaaggtgtgctcggccacggcgtgatcgccataatgttcggcgttgcagacgcgaatcttcagctcgcgcgccttatcgagattgatgtagctggcgacgccggtaccgcagaacacgatgcacttgacgtgcccctgctcgctgatggcgtgcagcagatcatccgaaatgtggtagccacccaccagcagggcgtcggcatccttcagacgctcggctatggtcgcctcgtcggacgtgaattcctcgaacatacgcacgcgggcaacgtcgtggagcgcggggaactgggccttgatgggctcgatcatcgcgtcgagcacggacggcatcacgacgaggggcagatcggtgcgttcgctttgggtttcgtaaatctcggtcatgggctccacattaggaggccgacgggaaaagcgtcaccttgcggcttcccctccttgagaccaagccgagcaactattgctttgccgcctgctcctgcgtgatgttccattccttgacgacgttctggtccgcgcccatcgaatagatgacatcccagatgcgttggcgtatctgagcgtcgtaggcttcgtcccaacatgtgcctatgggatggtcgctggatatcgggcaccattggtagttgccttgatgcacgttggcggtgggcacccagtcgatgcggttgacgcgccacgaccccttgacgcccttcttgccggcgaactggatgcgtgcggtcacaccctggttgttgaccaaggtttccggcgtgttcgccgactcggtgacggtgttgcccagaccgtagacaatccacgtgccgttatagttctcgatgggctgcgcacaatggcagccggcaccgtagataacgtcgaaggcaccagtgtcggcaagctcatgggcttccgaaatctgccaggaatcggcgtaatcaaggtattcctgcaccgagtgcatggcgatggccaccacatcggcaccttgctcgcgggccttgttggccttgtctaccgcgcgctggatgtcgctgccgtgattcgggtcgccgtcttcgcgcagacgatccacctgccagtcctcgtcggcggtcatgccgttgagggagaccgtgccggtgaccagacccagcttgccgccgccggtcggggaatcgatgactaacggtttggtggagtcggcttcggttttgtacgagccggtctgggcgatgccatcggcctcaagcgtgtcccacagacgggcgatgccatccgccccctgatcccaggaatggttggtggcgtgtgtgcaggcgttgtatcccacgttgcgggcggcatccgccacttccggcggaatgttgaagatcgggtacgcggcatatgggccgccgcgctgggcgatcggggtttcgaattcgcacacggcgatgtccgaagcctgaatgtactgcttcatcggcgcgaacagcgggtcgaagttgaaggcggtgccatccgtggcgttggggttcgggccttggaaatggctccacaatccctcatggaacaacaaatcgccgttgaccagcatggcgatgcagtccgtatccgggcaatccggtgaattgccgtgatgttcggtcaccggtttgggcgtgttcttcgctttattcaacgcgacgtccgacactccggcgcgtgcggggccattgccgtccgtgcgatgggttgcgaaccatgcgccgatgcccagcgtaacggcgagcgtgatcacgaacacgataatcagcgccgcacggttggttcgtgtcgagttggagcgatgttgcccctgcccagcgatatggctcatctttgcccacccttcggaactcttcttctctctctaggataccgcccatctcagtcaaacactgcggggaggaaggcgatgggcaagcgattggacaagcgacataaaccggttaatcttcaatcaccattcacgaccaccacgcaaaagtctcacttagtggacattcttctttcgtttgttagcctttccccgaggtgccgcactcgttcacccgctaaaatggcggtttggaggcggacggacaatggcgtacctccgactccgcttaccacaagcggagaccgaccgtcctcggttatttcggttatttctagcgacacattcccaggaaagtttcgcaaaacagacccccaagcaacccactagaaacacattcccaggaatgcgtcgcaaaacagatatccggacaacccaccagaaccgtattcccggggttcgaatccctctgactccgcgaagtgcgaacaggcccatcatcaggagtttccggaaaacaaaaaagattccaagctttcacccggaaccttaatcggcggagtcagagggattcgaaccctcgagccgtttacacgactaacaccttagcagggtgcccctatcggccactcaggcatgactccacgttacgcaataatgtgcaacagcaaattactgtaccacgtcctgcggatacggcgtgccgaacgacacattattgaccgtccgcgggcgcggcatcgccggagaacgtaacgataaccgcgcaaatcaccaacgccacaccgatgatttcaccaacgctgggaatctcgccaaacgccagtcccacggccaccgccatggcgggattgatggattgcattaccgaaaatgcgccggatgtggtgcgtcgcagcgtgatctgctccaccacatagggaatgaacgaggccatcagggaaatcacaaacagcagagccagcagcttcagcgagccgccgggctcaagcgcccacgtggcatcggccttggggtgaaccacatgagccacagccggcacgccaaggaacagggactggaccagccagccgatggtcacggcgatgcacagattatccagcgaattgccgccagccgccacgcgccggccggtgatgatgtacatgccccacatcgacccgccgatcaaaatcgcaatcagaccatacaaaaacgtgccattgccggacggattggccaatgatatgccggccaacagcaccacaccgaccgccgcgatgccgataccgacccgctcacgccagcttttgccggtaatcaccgccaccgaaagcggtcccaaaaattcgatagacacggcaatgcccatatccatattgctgatggccacataaaacagggtattcatcagcaccagcgagcagccgagcagtacgaccagcccccagccgcgggcgtcgcggtgaaacagctgcgctcgcttagccttgctccagggcctgcaccacagcagcaacagcaccgccatgaatcccacgcggtaccacaccgaatacagcgggtcgagctgggtgaacgcaagtttggcgacggccgtagccaaataaatcaccagtgcctcaccaatcacgataagcaccacgggaacacggttgaggataccgaccactgccttcttcacgaggtttacgctactcggagagtcgggacagcgcgcagcgacttggaaggcgttacggacagtgacgcaatgtggacgattccgtggaatcgcacccaccatgcgaaacagccgcacagtgcgcaaacccttggaattccggcgatatttggcattacgacaatgagcgccgcgccatgcgcgccacatagtgagcatgacctcgttcggcattcctacaatggtggcatgagcaccgcaccgagacttgaggccgccaaacgcgattggggccacgacgagaccggatgcaccgtgctgcatatcgacatggatgccttctatgcctcattggaggtggcgcgcaaccccgggctcaaaggcaagccggtgatcatcggcaccgggccgcgcgcggtggtgtccgccgcgagctatgaagcccggaaatacggcatcaattcggcgatgccggccgcgcgcgcccatcagttgtgcccgaacggcgtctttctgccggtggatatggcgtattaccgcatgatgtcgcaccgaatcatgcacgaggtgtttttgaccgtcaccgaccggttcgagcaggtttcggtggacgagggctatatggatgtgtccgccgcactgctggagtgggggcggccgagcgcgatcggcgcgtggattcgcgctcaggtggccgagcgcttccacgtgacgtgttcggtgggcatcgcctgcaacaaactggtggccaaaatggcctcgaccaatgccaagccggacggcatgctgctgattccggcggcccgctcggctgaattcgtgcagatgatgccattgcgtggcattccgggcatcgggccgtctttggagaagcggcttaatgcttggggcgtgcattcggtggctgaattggctcagctggatgaggctgcattgactagcgccactggctccccggctgcggcacgtggattatgggcggcctcgcacgggttggattcccgcaaaatcaccacggtgcgcgaggagaaatccattggatccgaggaaaccttggccgaggatacgcgcgatatgcgcgtggtatgcggtctgctgcgttcggcctgcgacgatgtggccagcacgctgcgacgcaagggactggtggcgcgcacgctgacggtgaagctgcgttttgctgacctgagctatcagacccggtcttttacgatggagcggccgaccgatacggccggcgtgctgtacccggaatgcgtgcggcagctgaaagtcatgctggggctaccggcctcggcggagtctgccactcccctgcccaaaactattcgcttggccggtatgagcacgtcttcgctcagtgaggcggcggctacggccgttcagcctaccctggatgacatgctcgaagaggcctacactgcccgcggc

SEQ ID NO: 2950 - DNA, 5361 bp, Unknown
  R19_24m  MAG No. k141_6279
gaacgcccggccgacgtggctactcagcaggccaccgcagcggtcggccaaggtttgcttatggctcgctacgagactgcttttggccgtttcggtattcgcgtcggccagattctgattaccgctgaagacacgattcgtgccacccagtaccgcaatgtggaacgcacgctggaccgattgctggaccttggtgtggtccccattatcaacgaaaacgattcgctggcgtccaacgagattcgattcggcgataacgaccgtctgtccgcattggtagccaatctggtgcgggccgaagccttggtgctactgaccgacgtggacgcgctgtacactgcaccgccctcgcagcccggctcccgccgtgtggaatatgtgccgaacgttatcgatgcacttggcgacatccaagtctccggctccggctccaaggtcggcaccggcggcatggtcaccaaactcgaggccgcgcgcgtggcggccgtctcgggcatccccacagtactcacctgcgcctcgaacgcgggcccggcgatgatgggcgatccggtgggcaccgtgttcgcaccggttaaggcccgcggctcatcacgccgtctgtggattggttttgccgccgacccgcgcggcacgattgtggtcgatgcgggtgccggccaggcgattcgcggcgggcgtgcctcgctgctggcggccggcgcgctcgaagtgcatggcgatttttccgccggcgatccggtctggatcgatgccgaaagcggcgaacacctggcccgaggcctcgccggcttcgattccgaagaaattccgcagatgctcgggcgtaacaccgcccaactcaagcgtttcctcggcccccagtacgcccacccactggttcatcgcgacaatcttgtacttgtgtgactgatgggatctgtcacacgacaggtttcatcaccatagtgcggctctggcgatttttcgtgctgtaggtttagcatggaagccatgactatggcgcaatggcagactctttccgaccgtatcaacactgtggcaccgagcgctacgctcgccgtcgattccaaggccaaggccatgaaggccgccggacttgacgttatcggcttcggcgcaggtgaaccgaatttcccgacccccgcaaacgtggtcaaggctgcggcagatgcctgccttgacccaaagaattacaagtacacgcctacgccgggcctgcccgagctgcgcgaagcgattgcggctaaggtgctgcgcgattccggctacgaggtgtccgccgaccaggttgtggtgaccaacggtggcaagcaggccgtgtatgaatccttccagatcttgctcaacgatggcgatgaggtcatcatccccgctccgtactggaccagctatcctgaagccgtcaaattggcgggtggcgtgccggtcgaagtattcgccggtgccgacgtgaacttcgagccctcgcttgaggcactggaagcggcccgtaccgagcgtacgaaggcaatcatcgtcaactccccgaacaacccgaccggagccgtctggaagccggaaaccgtggaagcgatcggtcgttgggccgtcgagcaccacatctgggttatctccgacgagatctacgagcacctgaactacgacgacgcgcgcaccacctacattggtgccgccgtgccggaatgccgcgggcagctgctggtgctgaacggcgtggctaagacctatgcgatgcctggctggcgcgtgggctggatggtcgcgccgcttgaggtggccaaggccgccaccaagctgcaggggcatatgacctccaatgtggccaacatctcccagcgtgcggctctggccgccgtggctggcccgctggacgaggtgcatgagatgcgcaaggcgttcgatgcacgtcgccgcgcgatcgtggctgctctgaacgatattgagggcgtcaactgcccgactccgaccggtgcgttctacgcttttgcggacatcaccgctttgcttggcaagccgctgggacccaacggcactgtgtccgatacgtccgctgattttgccgccgcactgttggatgaggcccacgtggccgccgtccctggtgaggccttcggtgctcccggttacctgcgtttctcctacgcactggccgacgaagacctagccgaaggcatgcgtcgattcaaggaatgggctaactgagaagagtcgtgtgccgcgcacatgccatgcgcgcgacacgcgatttgcgataatccaccggagccgttactataacaacttggcggtttcgccgtggcgaagcgttctctacggaatgcacgccgaggtggattttcacctagggaagtggcgcaattggtagcgcaacggtctccaaaaccgtaggttgtgggttcgagtcccgccttccctgccaagttttcaataatcaagcagctgacgcgaggtacagaatggctaagacgaacaacagcgaaaaggtagtcaagccgaatgtcttcatgcgtatcggtctgtttatcaagcagatcatcgacgagcttcgcaaggtcgtaacccctactgccaaggaactgttcttctggtctctggctgtgtttatcttcgtgctgctgctgatggccctcgtcacgggcatggacttcggtctgggcaagctcgtgctgtgggtgttcggctgatccgcacaacctaaggtgaataacaacgcatgagtgatgaactgaatctcgagaatctcgacgccgtgccggctgaggagcctgttgtcgaggcttccgaagctgctgccgatgaggcagctgccccggctgaaccggttgctgacctttccgcagaatctgacgcatccgtcgacaatgcagatgttgagtccgccgctccggccgcgactgaatccgctcccgttgcttccactcagactgaggccgtttctctggatgaggacgaggaagaagtcaacgaatccgagcaggccgaggaaaccgatgccggtcagcaggccgttgacgaattctccaagtccctgcgttcccttgatggcaagtggtatgtgctgcacacctactctggctatgagaagcgcgtgaagaccaacatcgagtcccgcgtcgcctccttcggcatggaagatcagatcttccaggtcgaggtgccgatggaagaagtcgagaagcacaccgaaaagggcaagaaagtcatcacccgcgtgcgtgttccaggctacgtgctgattcgtatgtggccggatgagaatgcccgccgtatcgttcgcgaaaccgaaggcgtgaccggcttcgtcggcccgaccaaggatccagccccgctctcccgcaaggaagtcgtggcaatgatggctccgatgatcgcttccgaggcactcaaggccgctggcgacaagcctgccgccgccaagaagcgcaaggtcgaagtctcctacgccgttggtgatcaggtcaccgtcaccgatggacctttcgccaccatggccgccgttgtttccgacgtggagcccaccacccaaaagctcaccgtgctcgtgtccatcttcggccgcgatacgccggtggagcttggcttccaccaggttcagaagctggattaaccccaaactttgcagagcccgaccatcgtggtcgggctttttgcgttgtccgggtggatttgcataataggaaagcttgtgtctggagggaagacccgctagcacagcacagcaatataagttgcgggaggagaccgaccataggccgattgcctacagcatgcacggataaataacgagtcaagaccgagcgtgatagcaggcaagcggatctgaggacggcgaccattcgaaccgcgttatagaaagaagaaccataatatggctcccaagaagaaagtctcggcgctgatcaagctccagatccaggctggcaaggccaacccggccccgccgctgggcccggctctgggttcgcatggcgtgaacatcatggacttctgcaaggcatacaatgcccagacgcaggacaagatgggtcaggtcatccctgtcgagatcaccgtttacgaagatcgttccttcaccttcgttctcaagaccccgccggctgcagctctgctgaagaaggctgctggcattgagaagggtaccgagaacccgctgacccacaaggtcggctctgtcaccaaggcgcaggttcgcgaaatcgctgagaccaagatggaagatctgtctgctcgcgatatcgaggccggcatgaagatcatcgagggcaccgctcgctcgatgggcatcacggttacggactgataaggagaaggacagatggtaaagcgttccaagaagtaccgcgaagccgctgagcgcgtcgatcgcaacaacctctacaccgccaacgaggccatcgctctgctcaagagcatgcctgcctacaacttcgaccagaccgtcgaggccgtgttccgtctgagcgtcgacccgcgtaaggccgaccagctcgtgcgcggtaccgtcaacctgcctcacggcactggtaagaccgccaaggtcctcgtgttcgcccgtggcccgaaggccaccgaggccaccgaggctggcgccgacatcgtcggtgatgacgacctgatcgcaaaggttcagggcggcttcctcgacttcgacgccgtggttgctactccggacatgatgggcaaggtcggccgtctgggccgtgtgctcggtccgcgtggcctgatgccgaaccccaagaccggcaccgtgaccatggatgtcaccaaggctgtcaaggacatcaagggcggcaagatcgagttccgtgtcgacaagaacggcaacctgagcttcctcatcggtaagatgagcttcgatgagtccgctctggacgagaacttcaaggctgtggccgacgaagtcaagcgtctgaagccgtccaccgtgaagggccgttacctgaccaaggcgaccatcacctccacgatgaacccgggcgttccggttgacccgaacaccttggcctgaggctagcgagcttcaatagctactgaaagggacttcccgtaaagggaagtccctttttgcatatgcgatgaccggttgcgagaaggtgaacctggatggtcacgcaatcgaattcttgcaacacgccggtgaacgcatgaatttgttacgcatcggcaatgcaaaacggattattctggtatcagaacagcgcaaataggctgtttgcgacacgccgaaggaaccgtgtgattgcaacgattcctgaggcttttgcgcgcctggatttgcgcgaatccaaacattcgtgtaagttattcacctgttgccgctcggcgcggcgggtaccttcttctggttggttttccgtc

SEQ ID NO: 2951 - DNA, 3760 bp, Unknown
  R19_24m  MAG No. k141_6479
ataagacccacgtttctttatttaaccctaacccgatgttcgcattggtgctgttggcgtgcgtagttgcggcgaggaggacagttgttggcgaacgcgagcctttgcattgactggccagcccgccggagtaggtacgtgacggatatgcaaaagccccgcacaaggcggggcttcattgtggtggctccgaacggcgtcgatccgttgacctagcgattttcagtcgctcgctctaccaactgagctacagagccatgaacagtcaaaaacccggataatccgggtttcataaccattccagcgaccccggccggacttgaaccggtgacctccgccgtgacagggcggcgctctaaccaactgagctacggggccattgttctcacttgcgtgaggcaacagatgtatatattactgaaattcgccggtcgtgcaaatttcggcgtgttccgcgtaatttcaaggtttttgctatcaccagcacacggacacgtctgccataaacatccacaaacgacgaagggcgcgaccggaaccccggtcacgcccttatgaacagaagcacttcacggcatccaccgcaaagcaatcgtcaatctcagtcagcctgcttccaggtgtcgacgtcgatgtggtgttcggggttggcctgccaggcatcccacgcggacttgacgatgtcttccacgtcgtacttggcgtgccagcccatctcctcgttgatgcgcttcggggagccgatcaggtgcggcgggtcgccggcgcggcgggccatgacagcctcggtgaacggcagaccggtgaccttcttgacttcgtcgacgatctggcgcacggaggtgccttcaccggtgccgacgttgaaggcgtcgtacttgcgctcgtcacggtcgaggtacttgagggcggcgatgtgggcgtcggccaagtcggagacgtggatgtagtcgcgcacgcaggtgccgtccggggtcgggtagtcgtcgccgaagatggcgggggccttgccctgcttgaggcggttgaacagcatcgggatgaggttcagaatagccgggtcttcgagttcgaccgggccgcagccggccacgttgaagtagcgcagcgcgcagaagcggatgccgaacggctgctcgcaggcgcgagccatccactcgccgaacagcttggtctggccgtaggggttgatcggcagcatcgggacgacgtcctcaggcaccacatcgaccggcggcacaccgtaggtggcggcggaggaggagaagacgagcttcttggcgttcttggactgggtcatgccggtgagcacgttgagcatgccgttgatgttctgctggtagtaccacagcggcttctccacggattcgccgacctgcttgcgagcggcgaagtggatcacggagtcgacgccttcggcatcgaggatttcggccagacgctcgccggcacccggggcggcgatatccatgccgtacaggcgggagccttcgatgcgagtgggcttgccgtagctcagatcgtcgacgacgacgaccttttcgccggcctgatgaagtgcgtgaacgacatgcgcgccgatgtagccgcagccgccggtgacgagaactgtcatagttgacctttccttgtgcgggttgcaagtgtcggccgtgtggagttcagcggctgttcacttttggtccgctttgttaccttttgaaacaatttgagtatatcacacgaacataatcgcacaaaacggtggtgtcgtccggcaatatctgcattcattaggtcgatttggcgttcattaggtaggtcggcccggagccggcccgcacggacaccgggtaaatggcttgatatggtggttggtatcgcacaccacccacctaatgaacgccaaatcgacctaacgaatgaacagcggtgcggcgcacaaggaaaatccgaggaatatatgaccgatcccgaatccacagcaatcgattccgtcaccgcgatggccgcggaccacaccgaggcaccggcgcaccccctgcacaaggtgctttccttcgtgcgccgctccggacgtttggacgatcgcctgcagcgcgcctgggacaactatgccgacacatatctgttggatattgcggccggcaacctgctggacgtgcgcgaaggcgtcacgctcgaccgcgcgttcgtggagtcctcatggggcaacgacaatccgctcattgtggaaatcggcaccgggcagggagaaaacgtggcggccgcagccgcggcccatccggagacgaacttcctagccttggaggtctatgaccccggtgtggcccacacgctgctgctcgccggcaagcaggggctgaccaacattcgcgtggcccaggtcaacgcgcccgagctgttcaaggtgaccgcgcccggcaccgtggccgaggtatggaccttcttccccgatccatggcccaagaagaagcaccacaagcgccgcatcgtgcaggaggccatggccggcgacattcatcgcgcgctggtcacagacggcgtctggcgcatcgccaccgacatcgaggactacgccctgcacgtgcacgaggtgatggacggcctcgatggctggaagaacctgggcagcataaccgtcagcctcccgctggagcacgtgggcaagggcaatgccgacatggccgccgacatgccgcacgccgacttcaccgaatccgagcggttcgagggccgcgtgctcaccaacttcgaaaagaagggcctggccgccggccgcgtgattcacgacttcacctatcaggccgtcgccctgcactgattgcgacacgccgaaatgccgtcgatttgcataaccgaacaacctcccgtaaagtaactcgagttgttcgcccccatcgtctaacggttaggacaccagactttcaatctgacaacgagagttcgactctctctgggggtacttcattgaagacctcggtcatagcgaccgaggtcttttcgtattcgcgggaccaggcctgaaagcattcggcccacttccctgaaggaaacgggccgaatgcttggactcgggtttcaacccggaaggcttcagtccagcgatttcaccacaacgacctcggtgggcacgttgcccgcggtggccttggagtaggggcacagctcctgcgtacgctcgacgagcttggcggcagcctcatcgtcaagatcgggcagaactacctcaatcttgcccttcaggccgaaggactcgccttcaggaccgagcgagatgctggcgcgcacctgactcttggccagcttggtggccgccacgcgctgctccttggcggcaagcgccaacgctccttggaagcaggcgccccagccgatggcgaacagctgctcggggttcgtgccctgacccttgccgcccatggcgaccggcgtgtccaggtcgaactccagttccggctcatggctcacggcgtggccgttgcggccgcccgtaacctgcgccgtagcggtgtagacgatttgcgatggttcgttaccttgatatgtgctcatgctttcatctcagcacgtgttcacgcccgccacaaggactgtcccaccgtagacgatgtgacatcatccacactgtgacttcgcgcacagagtcccgacaccgtcctcacctcgtttatcggcaccatgcgtgtataaccacatatggcattatcggcgaatatcggccggcagaccagttgcacaaggagaacatcatccacatggcagacaccgccaacaccaa

SEQ ID NO: 2952 - DNA, 5148 bp, Unknown
  R19_24m  MAG No. k141_6500
catcgtgacgacggcgttgttcacgatcgtggcgacgtggaacaactacttcctgccgttgatcatgctcaaggacgcggactggtacccgctgaccatcggcctgaaccagtggaaggaccaggcctcgaccgcgggcggccaggcgatccagaacctggtgatcacgggctccctgatcacgatcatccccctggtgatcgcgttcctgtgcctgcagaagtactggcagtccggactcgccgcaggcgccgtcaaggagtgatggagtcggctccgccgacgcggtgtcttcaccgcctcgcggcggggtctctccctccgtcccggctccgccgagacaaccttcctcatcagagggaggtaaaatagtgccaagccccccctctgacgagctgagccgttaggcaaacagccctgtgggctgtttattcccgcggacgcagattatcgataaaattcaataaaggagctgaatcatcatggaacgtaaagagttcaagtggccgcagccgcttgcgggcaacaagccccgcatctggtacggcggcgattacaaccccgaccaatggcctgaggaagtgtgggacgaagatgtagccctcatgcagcaggccggcgtcaacctcgtctccgtagccatcttctcctgggccaagcttgagcccgaagaaggcgtgtacgacttcgattggctcgaccgcgtcatcgacaagcttggtaaggccggcatcgccgtcgatctcgcctccggcaccgcatccccgccgatgtggatgacccaggcccacccggagatcctctgggtcgactaccgcggcgacgtctgccagcccggtgcccgccagcactggcgcgccaccagcccggtcttccttgactacgcgctcagcttgtgccgcaagatggccgagcactacaaggacaacccctatgtggtctcttggcatgtgagcaacgagtacggctgccacaaccgcttcgactattccgaagacgccgagcgcgccttccagaagtggtgcgagaagaagtacggcaccatcgacgccgtcaacgacgcttggggcaccgcattctgggcgcagcgcatgaacaatttttccgagatcatcccgccgcgcttcatcggcgacggcaacttcatgaacccgggcaagctgcttgactggaagcgcttcagctccgacgccctgctcgacttttacaaggccgagcgcgacgccctgctcgagatcgcccccaagccgcagaccaccaacttcatggtctccgccggcggtgccggcatcgattacgacaagtggggttacgacgtggacttcgtgtccaacgatcactacttcacgcctggcgaagctcacttcgacgagctggcttactcggcctccctatgtgacggcatcgcccgcaagaatccgtggttcctcatggagcactccagctccgccgtcaattggcgcccgatcaactatcgcgtcgagcccggcgaactggtgcgcgactccctggcccacttggccatgggctccgacgccatctgctacttccagtggcgccagtccaaggccggtgccgagaagtggcactcttcgatggttcctcacgcgggccccgactcccagatcttccgcgatgtgtgcgagctgggtgccgacctcaacaagcttgctgacgagggcctgctgagcaccaagctggtcaagtccaaggtcgccgtcgtcttcgattacgagtcccagtgggctacggaacacaccgccacgcctactcaggaggtacgccattggaccgagccgctcgcgtggttccgcgcgctggcggacaacggtctgaccgcagacgtggtgccggttcgcggcccttgggacgagtacgaagccgtcgtgctgccgagcctgaccatcctatccgaagagaccacgcgccgcgtgcgcgagtatgtggcgaacggcggcaagctgttcgtgacctactacaccggtctggtggacgacaaggatcacgtctggctgggtggctaccccggctccatccgtgacgtggtgggtgtgcgcgttgaggaattcgccccgatgggcaacgacttccccggtgccatggaccaccttgacttggacaacggaaccgtggcgcacgatttcgccgacgtgatcacctccgtggccgataccgctcacgtggtcgcctccttcaaggcagataagtggaccggtttcgacggcgctcccgccatcaccgtcaacgacttcggcgacggcaaggccgcatacgtcggtgcccgtctcggccgtgagggtttggccaagagcctgcccgtgctgctggaggaactcggcatcgagacttcggctgaggacgatcgcggtgaagtgctgcgcgtcgagcgtgcggacgaaactggcgagaaccacttcgtgttcctgttcaaccgcacccacgatgttgcggtcgtggacgtggaaggcgaaccgctggtcgcctcgctggcccaggtcaacgagtccgagcacacggccgccatccagcccaacggcgtactcgtcgtcaagctgtaaaaccgcgcatagcgcctaattacccaacggctcccttgctgctcatcgtagcaggggagtcgttttcgtatctccagcaaagtcgggtagggtggtcaccgtgcgaggcaaaaacagagtgacgatggcggacgtggcccatgaggccggtgtttcggtagcctcggtgtctaattttctgaacaaacagccatatatgagcgaggcgatggccgcgcgtattgcggaagccatcgacaggctcggatacaaagtcaactcgtcggccagaaacctgcgttccgggcgtacccggttgctcaagctggttattcccgatctgcggcaggtgtacttctccgaactcgccgaggatattctggccgaggcccggcaacatggctacggcgtcatcgtggaatccaccactaacaatcgtgcccgcgagctggaaagcatcgcatcgatgggcacgcacagcgcggacgggctcatcttaagccctctgatgatgacggttgacgatatcgcggctttggatggcgattacccgctcgtactgttgggtgaacgtttgttcggcgtcaacgcgccgcacgtagtgattcgcaatcgcgaaggggccgccgccgcgacttatcacctgcttgatgccggttgccgccgcatcgccgtagtcggtgccgtgccccaccccgagcacgatttctcgtcgggctccatccgcacccatggatatcgtgaggcgctggccgcgcgcggcatcccctgtgatgacagtctgcttatcgaaacccaaggctgggggagcgccgacggtttggtcgcggtggacaccatgctggagagtggcctgcaattcgatgccgtgttcgctttgaatgacttgctggcgtggggcgtgctgcgtgaactgcgcgaacgcggcgttgccgtgccggatgatgttcgcgttatcggcttcgatgacgtggaggaatcggcctacatggtgccgtctctttccaccgttaaccccggcagggaagccatcgcccgactggccgtcgaatccatcatccaacaggtcgaatccggcagccgtgcccccgcccaaaccatcgaggccccctatagcctctccctgcgcgagtcctcaccggcgttggcgcgcgcctgatgaatccgtggttcgaaatatccgaagtgaatgacaaggcccgtcaatcgtatggtgattgacgggccctggtcgtattggacttgactgtacttggtacgggcgtgactctccgtcttttagccgtggaattccacgctgatccaggagatggcgggaagcgttgccgtgcaggtgccggtggcgttcattgcaatgtcgagcggttgcggcgtgacggcttcgggcgcttcggcggtgttggtgcggtacggatcgtcctcatgcaacagttgcgccttgctgagcgcgagcgtgccgagaccgggcaggccgggcagcccggaaaggtcgatggtgagcgtgtgcggggtgttggcgtcgcggttgacggcaagcagcagaccggtgcgggcctgttcatcccacgtgactaccgcgtcgatggccggcacgtcgccatatgcctcggtatggatggtgggggagctgatggccggagcgtaggcctggccgcgcgcgtgaagggcggcttcggcgaacgggtagaacgtggtctgccgccatgccgggccgtgttcctcggccatgatgggggcgatgacgttgaccagctgggcgcgcgaggcggaacgcacgcgatcgcagtgcttgagcagggtgatcatcagggaaccttcgaccaccgcgtcggccgcggtgtagatgtcttccagcaaatgcggagacttaggccatggctcgtggtgcaaaccctgcacggcctccgccttccactggtcttcctgctcgttccacttgtccgaataccatacgccccattcgtcgaaggacagggcgatgtctttggtgccgttgttggcttctcgcgcctgatcggccgcgtccgagacggtggcgatgaacttggtcatgtcttcggaagaggccaggaagtcctgcatggaggcggcggtccgggttttatggccgcggtcgaagtagtaggcatggcaggagacgaagtcgagattctcgtaagccttggtgagcacggtcttctcccacgtgccgaaggtcggcatataggcacccgaggaaccgcaggccacgagttcgagaccggactcggcgagcttcatggcgtgggccaccttatccaccgcgccggcatattcttccgggctcatgtggcccacctgccacgggccgtccatttcgttgccgatgcaccacatcttgatatccatcggctcctcgatgccgttggccacgcgctgatccgcccaagcggtgccgggcgcgccgttgacatactcgagctcgtcgagcgcggctttcagcccccgggtgcccatgttgacggcaagcatgatttcggtgccggctttctggctccagcggtagaagtcgtcgatgcccatctcgttggtttcggtgcaatgccaggccaggtcgcggcgcacggggcgattctcgcgtggaccgatgccg

SEQ ID NO: 2953 - DNA, 15605 bp, Unknown
  R19_24m  MAG No. k141_6761
aaagtcgacttgcccgcaccgttctcaccgcagatcgagaacatctggcccctcttgaccatgatattcacatcgttcaacgcggtgaccgggccgaaacgcttcacgatatgacgcatctccaaaatcacgtcaccgttcatagccacagctacctcctccgatagtaatgcccctgtgcatggatggagacgccgtaccgcaaccacgcagtgcagcgcccccttgtataattagtctgttagcgccttcgcaatagacagaccaattcgatcttttgccacgcacggaatgagcgtagcttgaagcgcatggtaaatatcaggcttccccggccatactgtgccaatcacttgattgttggcatcaagctgatggaaccaactgccacgttgatggtcaatcatatattcatcaacgtattgccaaaaacgcgcataccactcggcatatatcgatttcccggtaatccggtacagcaccgaagcggtatcaatgccttcagccagagtccagtgcatacgatcatgcactaccggtcggccctcccagtcaacggtgtacactaagccaatttgaccatctacgttccacccggtttcgaccgctacggcaaacagattttccgccgcctcaatatatcgatcacgagtcgactcgtcgatttccccatgatcataggagcttacggcccattgtgtaatcagtcttccccattccaagctatgacctggagtggtcccatatggcttaaattgatcatcttttttctcagcattgtattcgtatacaggtttccactcttcagtaaagtgttcggggatgtgccagttacagtctgatgcaaaaccgactgttcgctgaatcattcggccagcgcgcaacctatatttaggctcttccaaagcatcgcttgctgcgaggaaagcctccaccgagtgcatggaggaattaatgccacgatactgctcgcaatgagtaaaagaggtatcccaagtatctctcggcatgccatactgttcatcccagaaatagcgatcatatactttcaacgccttatctagcaatgctctggattccggaatatgcacaagacttgctgaagccgcacccaaaatcacaaaggcatgggcataacatcctttattgggatccggggttccttcttttccaacgcgggtataccagcccccgtgttcgcggtcaagtaacagcccagtagtgaatccgtccaacgcctgcttaattaacggcaaagcctcatcttcaggcacatatccggctagaagcccaagcgtgtaggcatgagcatatcgtcccgactcatatgcatataggccttccgacggaaccggattgccttcatcatcgagatatgaggcaccaccgcccggccacgcgaagcgcttgccgaaatccactaattcttgcgcttcccgattgagcaaatctcgattatctttggtatcaatttgatattgggactcagtaattggtgtcataattcagctcttccctattcattgccattcggtgtcatttcaagccggcatcttctgctgagatgtacccggaatcaacaagcaatgacttgacattatccttgtcgacagcttcaggaacagccatgatcgaaggcacgtctttgttgccattaggatatgtttcttgagtcttcggagttttacctgcaacaacgtcgtcaataatgccggccgtaatatcggcaagcttacggaagtccttgtatacactcatggtctggcgcccttgcacgatggcctgtacgttggccttctcagcatcctgaccggtgataatcgggtaataatcccaaccagcagattccacggcattgactgtgcccaaagccagtgcatcattgggagccagcaccgcgtccaaccgttcgccatcaccatagaatgagttgatacgattctccatttcagcctgggctttttgtcgatcccagttttggataccaatggtttgccaatcgtcaactgatttcggaactttgcccgaccgggattgcaacactccggactcaaaatactgtcccagtttgctccatgagccttcaaaatagtattttgcattgttgtcgtcaggagaacccgacatcaattccacattgaaggggcctttcttgccctggtcaaggccgagtttcttaactatatactctccttgcatttcaccaatttttgtattgtcgaaacttgtgtaataatcaaccgcatctgtattcataatcatgcgatcatatgcaatgactgtcgccccattgtcctttgctgtttctgccgcagcaccggttgccacaccatcaagagaagcgataacaacaatgtcggccccttggttggccatgttctggatttgtgacgtctgttggtccaccttgccatcagcatactgtagaacgactttgtagccgcgcttttcaagtatttgcttaagattgctgccgtccttcttccaccgttccagctgctgttccggcattgaaatcccaacggatatcgaggacggatctttaccgctcgcctcagacgaggtcgccgaaccaccacgacttgatccacaacccccagcgccaatcagcattgcaatgctagctcccatagctacggttttcatccaagtcttcatcattgttcctttcacctttgaagagacaagtcagatgttcatttatctgacgaaaactattaaatcattgatatatcaatacatcaaatcgacattagcaatgcgtcgtttttacaatacgcaatcgaacatcacatcatcccacatccgaacattcctgaaacatcaacgtttgcaaggtatcttcgtctcacgttcaagaaatggcttaaccgctgccttctctgcgacacaacgcacggcctgccatcagtattggatatatcggtatatcatatacaacagcactatgttcttatttgttactttagtgttatttttaatgggcgtgtcgcatcattacatagacctcatcaatctgctgcccatgacaatcagctcacttcataatcctattgattttcagcggcaaagcactcccataacgtaagggctcaatggttgaattcaaagtacgtacgtcccgcagaaggctcttcactattttcgagaattgccgcaaggaggaatatcatgcctacggaacgatttgacgacatgttcaatgaggccatgaaagacccagaaatggcggaactcatccacgaatacataacgcagatgacagcaggcattcaacctgtcgaggcctgaactggtgccagaatgagtgcggatagggcatctcagcaaagtgaagtagctaagatgactgttctcgaatagtcccatgaaggcagcgccgacgcacccgtattcccttccattagcgcaacattcccgggaatgttgcgctaatgcgcttgggttcctctccgccagcacaacattcccgggaaagtgacgcgcaaagagtgtcaggcgcgtcgctcgatgagtgcgcggccggatgcgaggcggtcgagcacaccggttttggcgatggccagcatcagataccaggccatcacgccgctgataagcacgccgccggtgacctcggaaatcatgtgcacgatgccacgcgggctgacgaatgacacacccacgtagcgaaacagcatcagatatgtgccgtattccaaggcgaccaacgcaccggatgcaatggaaatcggcagattgaacatgcggtaacgggtcaaagcgaacggaatctcagcgaaaacaccctgcagcagcgccgagataatcacgaagcccaaatcgaactggctaccaatcaccgtttcgaccagcgtgccgataaggttcacgtacagcgccgctccgggtttgcgcagaatcagcaccgccagcgtaccggagaaataccagacggcgtgcacgatgctggcgaaaccgggcagaatcgcaccaaacaccgaagagatcggcatgtacgcgaagttgaatccccagaagatcacgccgcaggccgcgcccagtgtggcaccgaccgcgatgtccaacggctgccatttcagcgacgatacggcgaccgaacgtttcggaagagtatgaatggtggttgcaggcatggtgatctcctagccttaaaggccgcacacagtaatcgaatcacgggcgttccttgacctgtacggctcgggcgggaacgccacaccacagtatagccgctcggttcacggctggaagtacccttggaggttatgaagcttaccgatatttcccccgcaatcgcattgaccccgctcgacggccgttaccacaaggccaccgccccgctcgtcgaatacatgagcgaacctgccctgaaccgcgaacgcatgcgtgtcgaagtcgaatggatgattcttctggccaacggctttgagggcaacggcaaccagccaatcgttgacggcgtcaagccgttcactgccgaagagcaggccttcctgcgcgccattcccgaggacttcggcgccgaaggcatcaagcagcacgccgctcatgaggccatcacccaccacgatgtgaaggccgtggagtactacatcgatgatcagatcgacaaggctccggccgagctggccaacatcaacgacgagctgaagaccctcgtgcacttcgcctgcacgtccgaagacattaacaacctctccatcgcccgttgcgtcaagaacgcgatggaaaacgtgtggaccccggagttcaagcgcatcatcgaccacctcgccggcaaggccgaggaattcaaggatatgccgctgctctccctcacccacggccagccggccacgccgaccacgctcggcaaggagctcgccgtctacgtctaccgtctgaaccgtcagctcaagcacatcgaaaaccaggagtacttgggcaagatcaacggcgcgaccggcacgttcggcgcccacctggccgcatgcccggatgtcgactgggtcgccgtctcccgcgaattcgtcaccaaccgcatgggcctgacctggaacccgctgaccacgcagatcgaaagccacgactggcaggccgagctgtactccaccgtctcccacgccaaccgcatcatgcacaacctgtgtgtggacgtgtggatgtacatctcccgtggagtgttcgcccaggtgccggtcaagggtgccactggttcctccaccatgccgcacaaggtcaacccgatccgtttcgagaacgccgaagccaacttcgagatctcctgctcgctgctcgacaccctctcagccacgctggtggaatcccgttggcagcgtgatctgaccgattcgaccacccagcgcaacatcggttccgcgctcggctactccttgctcgccctgaccaacctcatgggcggccttgagtccatccacccgaacacccacgtcatcgagcgtgagcttgatgagaactgggaggtgcttggcgagccgatccaaaccgccatgcgcgcctgcgagctcaagggcctgccgggcatggacaagccgtacgagaaggtcaaggagcttatgcgcggccacaccatcaacaaggaacaggtcgagcagttcatcgaccagcagtccttcgacccggaaaccgccgctcgcttgaaggctctgacccccgccacctacaccggtgtggccagccagctcgtcgctttcgaccgctgaaataggtgcgatgcgagtccctcgagcccatcgcatccaccacactactgcgctgagtcacaaaccaaaccgcaaactgaaccgaacaaggacaggcgtcaggtaaccatttcatgactactgaacaggagcagtccactacggaagatcgcccggacaaggcgacctcctccactaccgaccggccgatcgcctctggtgacggccggtcggccagttttgctgtcagcggaccggacagcccggcaaccgacgacagcaacgattccggaccgtacatcgacgacatcgctccgcgccgcacgcgcgacttcggcgatctgacccgggccggtctgtcgctgttgatggccgccgtggtcatggtgttcgccgtgtatctgggcggcatgacgcgcggcgtcgaatccgacgcacacaccgcagcccaggtcatcaactggttggctgacttcccctccaccgtgctgacgcagctggccaccatcgtcatcgtgatcatcgtgctcgctcaattgctactggcccgggaatggctgcaggccgcggtgtccgcgctggccatgttcgccggctacggcatggtgtgggtcgtatcgacggcaatcagcagtctgaacgatttcaccctgccaatggcactagtctcagccgccacctcatacggctccgggctgttgcccgacatctacgccggcatggcgtccttcctgaccgccgccgggccacgccgcacccgctccacggtcaaatggagctggaatatcctgtatgccatcgctgcggtgatggtggtgctgtcgtggcattcggtcaccggcatgctggtgtcgatggccgccggccgcacagtgggcatgctgatccgattcgtggtcggcacgcagaacaagggcgtgtggggccaagatctggtcgccgccctgaaaggcatcggactggacaccgcctcgctgattcggcatcaggagcccggcgtcggccacggttcactggccgtcacgctggacgacgatctggccgaaggctcgcgcatctacgatctggataccacggacaaccgtcgtttcatcgtttccgtcatcgacgcgcagacccataccgtcggctatctgaagcagttgtgggactgggtgcgtttcaccagtgtgtccatccgacgtgaccgttccgtgcgtgacgccgtccagcatcatttcgccatgctgctgggtctgcacaatatcaaactgcccgcgcccgcaccctacggcatcgccgataccgacgaatccgcgattctggtgctggatgcacacaccatcgaactgcccgccaacctgaacacgcttaccaaggcggatgccgtggcctacatgcgctacctgtccgtggcgagccggcgcggctatacgcaccggcgcatcacgccggacacgctcgcccggcttgaagacggcaccgccgtgattgccggctggctcaacggcgacaacgcttccggtccggccaacaccgcgctcgacaaagttcagctgctagtgctgttcgccgcgctgatcggcgtggaaccggcggtggaggccgcccgcgaggcgtggggagacacgactctgacggccttggccccgttcattcagaaggtcgcggtcccctcccccacgcgcgcgctggaatcctgggacaagcagctgctcaagggcctgaggagtcgtatcaccgcgctggctgacgaggagacggtggaatccgccgaaccggtgacgctggcccgattctcctggcgttcgatgatcaccatgctgctggtcatcgtggccgtggtcgtggtcttcacccaactgaagcccgaggagatcatcaccgcgctgaccaacgccaacccgttgatggcggtggtgacgctcgcattcggtgtctgcggctggatcggctcgtcgatttcgctcggttccctgatggcgcggcacaagcgtgacaatatgggcgtcttcatgagccaggtggcaggcggcttcgccaccgtatccatgccagccggcgtgggcccctcgttcgtcaacctgcagttcctgcgcaaatccggctatcgcaacacccaggcgaccgcaattatgagcgccgcgctcgtggtgtattacgccgtgtacttctccatgctggtcatcatcggcctgttcaccggccgcaacatgttctccggcgcaatcccgacaaacacgttggttatcgtgctgggcgttgtggtcgtggtgctgtccattgcgatgatgattccgccgttgcgccactgggtgacccgtcgtcttatgccgctggccaagacgtatatcaaccagctgctggacgtgctttcccagccccgacagctcacagtcagctgcctgggcgcgctgttccagaacgcgaccactgggctcgctttctgggcggccctgcaagcgttcggccattcatcgaatccgattgaaacgacgttcgtcttcctgctggcctatgcattgggttccgcagtgcccactccaggcggtctgggcggtgtggaagcggcactgacattcgcgttcgtggcggtcggagtgccgcagggcgtggcgctttccgccactttgctgcaccgcgtggtgttctactggctgcgcattccgctgggcgcggcggccatgaagtggcttgacaagcataatcttgtctgattcgtctattttcatacccccttcggggaaatagatgtgaaaacccttataaaacgcgggttttcgcagaaacatgcgctagtatcattgatgacaacatggactaagcaaaagtgcttgtcccctgacccaagaaggatgctttatggcatacaacaagtctgacctcgtttcgaagatcgcccagaagtccaacctgaccaaggctcaggccgaggctgctgttaacgccttccaggatgtgttcgtcgaggccatgaagtccggcgaaggcctgaagctcaccggcctgttctccgctgagcgcgtcaagcgcgccgctcgcaccggccgcaacccgcgcactggcgagcagattgacattccggcttcctacggcgttcgtatctccgctggctccctgctgaagaaggccgtcaccgagtgaccttctgctcgtagcgattacttcgagcattactgacgacaaagaccccgaccgagatggtcggggtctttttgttgtggtgctgtgacgtgttgtccaaccgtattattccggactagttcagcgcttccataagctgctcgaatcccagggtgggctcggcctcgaagggatcgaggagtatggcttcccggcgttcgggggcggtcagggtcaggtgggtccagtcggcggagaactgggctccgacgttcagggccgcgtccacgaaccggccacgcagggcggcacgggtgtcggtcggcggattgtgcacggcgtattccacgttgtctcctgtcagcagctcacgcatctggttgcgggctacgagcgaaccgtacaggcgaccgttggcgatgtcgtggtagtcgagctcaagctgttccatctgggcgaaggtgacgtccgggcgacggcgtttgagcgcgtcgaacagacgcttcttggcggcccagtccacgcggtcggcgagcgcatcgtatgcaccacgctccagcgcgtccagaacgcggctccactcccccataatcgtgtcgatcgtggtggccggcagcgaacttgccagcgcatcgccatgggtttcgatgaaggccttgaccgccgcataataccggcgctgcagacccagtgcggacacggattcgcctgattcgagcgtcagttcggcgcgcggattgtcaaggaatcgactgaccgtgcgattggcggcagccggatcagcaaaggcatactgctcgaatccggacggaacgccatggcggaaggcgtcttcgatcgcgcacagcacaaggtgcgtgacggcaagcttcatccatgtggaccattgcgaacggttcgagtcgccgatgatcacatgcagccggcggaaggagtcggggtcggcgtgcggttcgtcgcgcgtgttgaccatcgggcgggagcgggtggtggccgaggagacggcctcgtccaggaagtccgcgcgctgggtgatctggaagccgtccggggtcatgcggccggcaccggtgtacagctggcgggtgatgaggaacggcagcagctggtgttcgatggtctccaacggcacgaagcggcggaccaggtagttttcgtggcagccgaaggcgtggccggcggagtcgacgttgtttttgaacacatggatcgtggcgtgtgcgccgtaggattcgcgcagcttgcgctgggccttcagggctaggttgcgcatcacgtgttcgccggcgaggtcctgggccagggcctcgcgcgggtcgcgcgcttcggcggtggcgtattcggggtgggatccgacgtccagatacagacgtgagccattggccagatacgtgttggtggagcgggaacgggagacgatgggctggaacatggtcatcgccacctggccggcgtccacggggcgttcggcaccggtgaccgccacgccgtattcggtttcgacgccgaaaatacggcagaacccgtccatctcggcggatggtacgggttccgtggcgtgcagggagcgggtgccgctgtcacgcagttggggcatcactcgccgcctttttgcacgaagctgttgacgtattcctcggcgttggtttccaaggcggattcgatgtcgtcgaggatgtcgtccaacacgtcggcttggtcggtggactcggtttgggcggcggcctgcgtggtggcgagggcgtcgtcttcctgggtcgcggcctgctgtgcttgaggttgttcgaattgttgtggcatgttgtcttctttttgggctgtcaaactcccctcagtcagccttcggccgacggctcccctcacccgaggggagccggaggagtcaaaaaattatcgctggttgatggagtcgagccacggatactgctgcaggtaatgctgcagttcgcggatgatgagtccattggaggccactacatcgttatcgtgacgccagtggatgcgttcgccgtcccaacggctcagcgtgccctgtgcctcccagaccactacggtgccggcggcgatgcccgcgatatcccacacgtgcagcatcggctcgaagtaggcgtcataggtgccgtcggccactttgcacaggtcgagcgagacggggcccacgcgcttgatgtcggccgggcgtccggcgagcgaggaggccacgtcgagcgcacgctgcgattcgctggggatgaaggacatgccgtagctcagcacagaaccatccagcgaggaggtcatcgacggcacgaccttgtcgcgcttctcgccgaccgcggttttgtggatgcgcacggcacccgctcccctggcggccaggtaggtcaggccgagggccggggcgtgcacgatgccgatgatcggcttgggctcgttgtccgggccgaattcgaacagggcggcggtcaccgtccattcgctcatgcgacgtacgtagttgatcacaccgtcgatcttgccgatgtaccagtaacgctggccagggcggctttcggcggggcgggtggtccagaagccgtcgaagtgggcgatgtcggcgattctggcgctcatgaagcgcatgatcttgttgtccacttcaagcttgtagcgggggccacggtccgcgttctcggtgctcggctgggcgaggttacgcggattgagttggtcgtggagggcatgctggccggcttcttcgagcaggccggcgactttgagcgcaaggttgcgcaggtcctgtggggtctcttcgcgtgtttcttccatagctaccaagtctatcgttcggcgttgatggccagcgacttcagcagatcgatggcgtgttcggctgaattgagttcggtttcgcagtgcgccttggtgaaggcgagcggatcggagatgtcgagggagaacaggtgatggtcggtagcggccatatggccggcattgccgtagaattcgaccgcctcgccctcgtctgcggcgcgcgggtcgcgaacagtgagtcgggaccagctggcggcggccacctcatcgccgaattgcgccacgagttttgccctgagccaggcgcgggtgtcttccggcggttcggtggtggcgcgtgcgatgtcggcggcgctcaccacccgttcggtgcggggttcgagtttggtgaagatgctgtccgcggggtcgagcgccgcccatttcaggtcgatgaccttcagtcgcggatcattccatccgttggccacgccgggtgcggacgttgtggtgattttgcggcgcagtttttcgagcagctgccatttgagcagccattcgatgcggctggcctcgccggtcatggccagacgttcgtcatcgtcggcggcatggcggatggaggcgcagtcgatgagcgcctgctgccacatcgccataatggatgtggtggatttgtccggccaggcgggttcgccggcggtgtcggtaccttcgaccagtgcggcaacctggtagacggcttggcgcagtttgagctggataagccatgcgttggtttcgccgccgttggccagcggcaagattgcccccagcgtcaggtcgcgggaaacggtgtgtatggcctcgactgggtcagacagttcgagttcgtcgaggaaggcgttcaggtcgaatccggcctcgtccgcatgttcgagcagccacagcagcatgctcgtggtgccgagtttcagtgcctgcggcacctccatgcgattggcgtcgccgacgatgacgtgcagacggcggtatgcatcggtggagtgggattcgtcgcgcgtattgatgatcgggcgttcgaaggtggtttgcaggccgactttggcgtggatgtagtcggcgcgctggctgagctggtagcccgggatctcgctgttctcgccaatccctacgcggccggagccggcgtagatctggcgggtgacgaagtggagggtcatcaggcgtgtgaccaagtcgaatggcaccgcgcgggccatcatatagttctcgtgcgtgccccagcaggagcccttgccatccacattgttgcgatgcagggcaatgggagtgccagtctgtttgcgggcgcgttcggtggcggcctgcatgatgaggtctccggcgtggtcgtatcggaccgcttcgaacgggtcggtggtttccggcgccgagtattcggggtgggcgtggtccacatagacgcggccgccattgggggcgatcacgttggtgatgttgagctgcggggcgtcggtgagcatgtccgggcgggcggcggcgcgttcgagacgggtgccgcgcgcgtcgttgaccgggtcctcctgccggtagtcccagcggatggatttgctgtggctgtccgcggcgccgttcaccacgtcgaaggacagttgcaccggattgtagcggtccggggtgttcagggataccgcgtattcggtttcggtgcccatcactcgtttaacggtcatgtagtgctccttgagcttgagctattcggcggtgcggatgcggcggatcgggtccatgccgttgatgcgcgaccattgttcggggtccacgtcggccatggaatcgcgggtctcgcggtattcgtcttccacggcggcagcgagcagcggcacggtgagtgccacgtccaagccggtttcgatggattccttgaccgctcgggtcttggcccggtccacgatgttcttgagcatcgcgccggagaccacgtcggccaggaacaacgcatgccactggccgttctcctcctgcacgtcgcatagatggcggcgttcggaggttccgtagatgtcatgcaccagcacggcggacaaggcgtgcgcgtcgacgccatcttccagaggcaggtcgtcggtgaggtaatggtccacgatggcgatggcctgattggttttgggccggccgacgcgaatcttgacgtcgagacgccccggtcgcaacacagccggatcgatcatgtccacgcggttggaggcaccgattaccatcacattgtcgagtgattccacgccgtcgagttcggagaggaactggggcacaatcgtggtctccacatcggaggagacgccggagccgcgggtgcgtagcagcgaatccatctcatcgatgaacacgaccaccggattgccgtccgcggcgcgttcacgggcgcgctggaaaatcaggcgaatcagtcgttcggattcaccgacgtatttgttgagcagttccgggcccttgacggacaggaacacgcccttgacatgggtttcggccgggctgattgcgccgtcgccattcgaatcgtaaccaccctcgcatagggcgttcgccacggccttggcaatcatcgtcttgccgttgccgggcggaccgtacagcagcacgccctttggcggcttcaaatcgtagcgctcaaacagcgcacgatgctggaacggcagttggacggcgtccctgatacgaccgatctcactatccaggccgccgatgtcggcgaacgtgacatccggggtctcctccagcaccagatccttgtcgccctcggcgggcagcacttcgatggcgaggcggacggacggatcgacgataatacggtcgccctgattgatgcccgcatacgcgagcgcgccggaacggcggatgagcacgggattgccggaggcgtcggtaacgatcagtcgaccgtcgtcaagtacctgcttgacactgcgaatctggcccacggtgtcagcatcgcgctgctcgaccagcacgagcttctcgttgagcatcacggtggccccggcggtcaggcgggcggcgttgacgttggaggccacaggcaccaccatgcggcgggtgccggaaatgacttcggccgacgcgtgctggatgccgtcttcatcggtgcgggtggaatcgaccttgaccatggtggcgaaggtgagcggcggctgagcgagctgggcgagctgtgacttcgccttggtcagttccttgccggcgcggctcagcgcttcggcgagcgcatggttcttggccatcaggcgatcgttcagcgcggcgagatcttcggtgtcgctcatgcgggttcttcgcttcccttctatccgggattttcggcaacttatggcagtcggcagaccctattcgttgccgtcggcggatttcctgttacgtataacagtacgcacttttcgcaccacgaaccatacgatgaccacaatcacggccgcgatgaccacgtcctcgaacacgccgagcgcgccttgaatcgagcaccactggtcgccgagcaggtaaccggcggaaacgaggatggtgttccacacggccgagccgagcagggtccagccggtgaagtgcaggaagttcatgcggttgaatccggcgggaatcgaaatcagcgagcgtaccacgggaatcacgcggccgatgagcaccgaccatgtgccgtattgggtgaaccagtcgttggctttgctcacgtctttgcggctgacgccggggattctgtctgccgcgagattgatgcgatgcagtcccacccagcgggagatgccgtacaaggtccaggcacccagtacggagccgatggtggcccagatgattgcgcccggcagactcagggtgccgcgtgcggcggtgaagccggaaagcggaaggatgacttcggacgggatgggcgggaagatggattcgagggcgatggccaaggccacgccgataccgccgatggtttccatcagcatgatcagccagtcggtgatggtgccgatcaggccgggttcggtggtggtgcagatgggtgtggggtcggtcgcaagaatagtggcggctgccatggaaaaa

SEQ ID NO: 2954 - DNA, 22614 bp, Unknown
  R19_24m  MAG No. k141_6800
cctcaactcgtcgatccggatgcgttcctgtgccgacaggtgggaataggctttcatatcgagtgcaacgctttctcttcggttgtggacttgaacacttccaaccatagacaggcgttgcacttctacctagaacccgggaaatcagaagccaaatgaataatgagatagcatagaatgcatgcttctggcctatatcgatgagtcacatacgcagcgatgcgatgaggaacccaatcggcacggatatgacgtgtattatgtcggctgcctgcttgccacgtcagctcaagcagctgtcatcgataacggcttagacaacttactggagcaggtgcatcacaaattcggagtacctcgtgacgctgaatttcacggtcagtgcatgttccaatacaaggacgactggaagtgcatgaaaggcatgcacaggcagtcggcaggtatctaccgcgcagcaatgcgaattctggccgacagcggtgccagattggttatacgcggcgtgcatgtcgggcaactacaggaacgctatcgcgagcacgctcacaatcctcatcaggtgtctcttcaacattgtctggaacgtgtcaatatgattgccgaacaggaacgtgatgacgtgtcaatcatggcagataaagtggcagactaagctgctcaagaaggtcagattgctcgttatcagctgatcggcaatactgaaggatatttcccctctgatttggcacgcatcaaaatgcctttccagtgggaggattcgcgcatactgtacgggctacagatgattgacatggctcttttcatgtgtggacgtgcgagcggcatcgatagcgccaagaaattaaatgacggagacaaagccgtgctaaaaatcgttgatgttattcgccctgccattatgccccaatcagcggtctggtatccgttggaaaagagaactgactacggttttctaactaagctgagctagaaatgcataggggccgctgaagcggcccctagcctaacagcgatcataagcctacaagcctacgctcgtcgtattgcaagcttacacatgacgagcaatttaggcaatatccggctgtgtcgtccattacaacgtggagctccatcataaatgtggacacgggttcaaggcttctcatcagatgaagtggctcttccggttttaagcggcatcttcacactctgtgcttgcgaatgcgttgccgggttgcggcggcgcgcgagtcacgcaagtcgtgcaagccacacaacgccgcgctcctcacgcgccgcatccgaatctacagccgcaccttccgcagcagacactgcacgggcttaagcaccacggtatcggcaattaccgcaaatagcagcgccgccagcaacgtagcgccaaacatcaacacgctgatacccgcatacgaccatccatctgtaggcacaggcatcctcgggccgatcagcaccttggacaggggcgaatgcaccagatagatcgtgtaggagtaccccgccagccagataatcgccttgcgcacccgcgccgacgtgatgtgcacgtcgtaccggaagaacaggaacaccgcggccactaccatcgcgaacgcaaccgtgaccgtgcggccgacctgcatctgctggccggcgaacagatatggcgtggcaacggtccaggtcagggcgaacggcgccaacgcatacaagccgcgccgcgcccgcgtggacggcggatagtattccaacacgaatcccaacagatagtagaccagcagtccccgccaggggaacgactgcaggaacgtcaacgggtatccggcaagattgcagatctgctcggcggcggccacggcggcggccagaccgatcagcagccaggcacccgaccggcctatcgcgcgcaccatcgcggccagaaacggcgtcgccaacacgaaaccggcaagcatgaatacgaaccaatagacggaatcgtcatacccggaaaacagatcgaacaacgttccagacacagcgccgccaaccgaacgatgatcgatcaccaggtaggcgacgaatcccatgccgcccgcatacagcagatacggcacaatcagcgagacgaaacgtttgtagtagtagcgcacgtacggcgcgaggctaccgggatcggcttggccggcaccgccgcctgtccgggcatcagagccagagcccggcagacggcccgctgagtgggtgctcaccggccggtcggcatcgaatgtcaggttgaaccggcccgacaccataatgaacagcggattgcagaccatgaacaacgcgaacagcacggatcgcaccgtttccgcgctgccggcgagggtcatcttgacgggcatgtagttgttgatcacgtggacgccgatgaccaggcacatcgccaccacgcgcagcagatcgtagttcacgtcgcgcggcctgccggcgacgccggaaacggtggcgtcggaaacggcgacgccggaaacggaatcgggcatggtcatcacatggatcccgtcagggacttcagatcgaccgggcagctgatctggctcttcagcttgtccaaggtgtccaggccggccgagggatcggaggacgcgcccttatgcgcgtcgttcttgccgccgttcgcaccatcggcgccgttcgcaccatcggcgccgttcgcaccatcggcgccgttcgtatcggccgggcactcatccgtcaccttaccgttggagcccgtctcgacgccatccgcattcaccaccggcgtggttaccacgttcagtggatgtgtggcatcgctgctgacccgaacggtataggcaatcgtcaattcttttccgggctcgatccactgctggttgaacataatgtactgacggtcatacaggctcacggtgttggtaccccatgaatctatatcagcctgcacagcggtgatttcgccaccgtacggggcggtaagcaccacgcggtacagcatgccaccgagcactggattctccgagccgccattaacgaaatcaggcaacgattcggccttagccttagtcagcgtgttcttcatggtgaaggtgaccgtgtattcgtcaccgagctgatcttccgtaaactgacccagctgcgtgttacgcacggctgtcgtgatgcgcttatccagcacgccagaatacagggcgttctggctggccgaggcgtcgccgcaggtttttgtgaccgtggtggaggtcttcagataccaatcctgcttgccttgctgcagctccgaaagatagatgccggtttcaggtacctgactgtcagcagacaactcgccactggccttatcatcgataagtccggtggcaatcagcgcctcctgctcatccggatcagccatccatagcttgaaatgaccgctagcgctggtatctctgattgccttcaacagcggggatgcggtggaagcattcgcgttgccaagcacatggttcataattgcttgagccgcttcggaaacgaagttgttctgctgctcgaagtccgggtaatccgtgtacaggtctgaagcgaagaacggcaccgtggtggtgccatccagcactcggccgtccgaaagcttgaccttgcctgtggctcccagcaatgcctggaggaatacgggatcgaatgacaatacacccgctacgttctcgtcttcgttgcctttctgatacagccacatgtatttgttcatctgtgccacacgctggaattcggggtcgatggtcgtggtggccgggtactggtcaaaagtgtcgccaaatacctggcgctccttcagcaccgtagcatccattggcttctcaggaatgtcccaaccagaagtggtggcgaaatcaccgatggtaatcgtgcccttatctgccgtgattgcggcgatggtgcccaccatgccgcccgccgaacgcagctcggccgggttctgcaccatcaccaaatacgtgcgcttgccgtcctcgccaagcagttgcggtagcaagttaatgaggccatcgtattcgctgagcatcgaatccacggtcttgagcgcagccttttcggattcgagcacggtggccaccttggcgacgctcggagtcggcaccttgttgagcttggtgagctgctgcgagatatccttatgcgcctgcttgacgatatccggcatatccatcagggcgctgacgtccaccgagccattcttcagggagaagccctgcaatcgtttggacaggttcagcagatcagtgaacggaccgttgaccagcgtatccacggaagccagcatttcgcgggcagcggtgatgtcgctgccaaatcgcgaatggtcgcggaagaagtcccactgcgggccgttcagctcctcgttgagatcattggtggcattgaccaactcttgggagatgtccgacagactcttatcgctgccgcagccaagtgccgaattggccagactttcggcggatgtcagcacacgctgcgcatccgtggccattctcgagacggatgccgcgtagagcgtgcccacacaggtgacgctggccagcaacgtcagcagcagtacaaccaccactcgcgcccatatcggtgtacggctgatcagcgaacggccgtcgccacccacgtgctggggagtcttcaggtttacgggacccgtctgctgatttgcagcgctattcgtagatgcggagcgattggatttcccgttaccggcatggcggcttctcctacgccccacagccttatggctcgaatgccctgaagtgaatcgcatacttatcctacccgaaaatctgctcagctcatactcttatccaacggcgcaaggccacgcttccggatgccggactccgggcgaatccggaatcgcagacatgccggagcacacgtgacgccacgcatatctcatgccagtgtaccgatgccaccgaaatagaccgagggtttatcccataccgggtgcaaatcccctcatgaccaccacatcgctgtcagaatgttctcagacttcattgaggggtataacagtattgcgcaagaaaacggtcactaaacgcaacaatagttaaagccgtattgatctgttcggcttaggagaacgggagaggtaattacatgttcgtcctcagcaacgcctggcgggccctgacacgttctaaaggacgtacggccctgaccgcattcatcaccttggcggtcaccttcggcacagtcgccggactggccatcattcaagaagataccaacgcacacaccaccgcatacgatcagcagaaggccacgttggccattcgcccgactgcggctacgtggaagaaggtctccgctacggactcggcttccaccaagcattacatgacgtggacctcatataccgaatacgccacgctcgtccagtcggccaccaactcgttgaactttacggttaccgaaaccgtgccggcccgcgtgagcggtgatttgaaggccctggacggcggatcgctgggctcgacctccgatgatgagaccggcggccagctcatttggcgagccttctggaccgaggatgccgccaaggccagcgacctcggtaccttcgaaatcgtggacggcaaggacctgagctacgacaacaagtcctccaacccgaacaccaccggcgcactggtctctgaagcgtttgcctccgccaacaacctgaaggtgggcgatacgctcaaggtggcggccgcctcggacgcccagaccacggccgagctcaaggtgcgcggcatctacaagtacacatccgaatccgccgtcgccaatccggtgacggccgcccgcaaccgcgagaacgcgatcttcaccaactatcagaccttcgccaaggccggactcgacccacagtccaacgacaagaccgcctccggctgggcgatgccggatctggacgtggtgttcgacaccggtgatcccgctacatacaagtccttggtatccaccctcaagaagtccaagctgcccgccaagggatacgaggtgtcttccccttcgctggaatcctacaacgcttctctggagccgctggatacgctatcctcgcgcgcgaagaccggcaccattgcgttggttgccgtgggcggcgtgctgttgctcatcctcgtgctgtcaggcgtgtgggcgcccaagcgtgatgacgagatcggcatggcactggtgtccggcgtcactcgtgggcgtttgggatggcagttcatgctggaagtgttcatcgtcaccctgcccttctacgtaattggtctggtcggaggcgcgttcgccgccaagccgatcggacctgctctggcatccggccataccatcccggtgacatcggacctgatttggaccatggtctggtatggcctgggttcaatcctgatcctggcgattcttgccgccctgcgccttgcgttcttcagcgcgaacaagctgttcgccgccgatggcgactggggcaccgtgagcgaggctgaggcgattgaaacggccgaaaccactggcgctgctgagaccgatgaagctgctgaggccaccgctcatgatgccggcgaggccaataagacgaccaccacaaccgacgatgcggaggcacaggcatgagcgacaggaacaacgatcaggaactcgagaagaccactgacgcaacggctgacgaagtgacttctgagactgagacgaacgacgccatcgaatccgttccagctgactccgtgcagttcagcgtgaccttcgatgacgttgatgacgaaggcactgttgacgatggtatttacagcgcactggcatctgccgaaaccggagaaaccgacgagaccagtgaggccgaagcagacgccatcgcttcggtcaacgcatccgccgaagtgaccgagcgcaatgccgcccgcgtcaacgaaacactccggctggccaaaaccgatcacaaagacgcattggccgagcatgcggagcctcagggcaaagcggccgaacccaccatgacgctggcctcacgtatcgatcgcgtgttggtgggcggcggttccgacgacattctgctcaagacctacccgacctttgccctgaacaaggtgacggtcgccggccccaagggcaaggtcaacatcctcgatggcgcgaatttcttctgctactccggacacgcatacgcgctgctgatcagcgacgaccccgattcgggtatcaccgccgacgccaaacgtcgcgcgctgatgggcgtgatgagcggtttggccacgccggtgtctggcacggtgatgaacaagagcgccaacattgttgagctcgagcccgtggaactgcgcggccaccgtctgggcatcgtaccgcagctacacgccgtgcagccgaagctcgacgccgaacaaaacgtgctgtacgccatggatgcgtccaaccgcaacttcctgaagcccaagccggtgatcgcccgcgaactgctggccaaggtcggcttctccgaggccaccagcggcgtggccgtcggcacattgcctttggtgcagcagcgtttggtggccatcgcccgtgcaatcagcaccgaggccgaagtgctgatcctcgacgagccgacacgagggctgaacgcggatgacgaggtgaccgtgttcgccgcgctggccaagctggcgcacaccggcgacccgaagcattgcgttatcgtgctcactgcgtcgcgcgagctcgctgaagcagccgacacactcttcaagatctgatctgtccggtagcaatacacaccagacacaccagcacaggctcttgaagctcacgatgttcggatacataccaaacatcgtgagctttttcgatttcgaggggctgatttgcgtgttccgggaggtctacttccgtttcaaggggctggtcatccgccaaaccccgagtataaacggcttcatgccaacgtcattccgccgtttttacgccgcgtatacttgggcaccagccccttgaaacggaagtagacctcaggaggatgccgaatcagccccttgaaacggagataggcatgtcgagatgtccgaatcagctcctgacaatcctgatgcggctcattgccgcgctaatctgaagataaatctgaccgtacgaggcgaaacctgataatcatgaccggatatattcccacactggagcagatcgacgagttgcaccgcaaaatcgcgccgtccaaggcggcgtacgagctggtgcacacgcattgcgtgattgtggcgaccatcggctgccagatcgtgcgccggcagaacgcgctgttcacgcgccgctgcacattaccgaaggacgcggaggtaccgcccaccgcaggcgtcaccggcggccatgtgccgccgcgtctgctcgacgagcatttagtactcatcggcggactgctgcatgacatcggcacctaccgcgtgttcaagcatgacggctctgacgacgaaccgctcaaattcagcaagaaacgctacattctgcacggtcttaagggctacgagtatctgctcgacgagggcgtggacgagtccatcgcccagttctgccgcaaccataccggcgtgggacttacgcgcgaggatgtggtgcgccaggagctgccattgccaccagccgactatgtgccgatgaatctcgagcaggaagtggtgatgtacgccgacaagttccatagcaagtcagtgccgccgaagttcctgcaggtcgaggcgtatacggcccgagccgagcgatttggcggagagaacaaacaacgatggctggatctggtggccaagtatggcgtgccggatattccggcgttggcggagaagtatgggatgcggatgatttgaggctctaggggcctccccccccccagtcagtctgtcggctgacagcccccctcgtcagagggagcttatgaagctatttcagatggaacggagacggtaggtgccgttgcggttggaggcgatgatcatctggtcgttctccagcacgttccagccttcctgctcatagccggaagaggagaccaccacaccggcggagtcgccgttgtcgtcgcgcagctcacggtagcgcatcacacggtagtcggcggcctgcgcgccacggccatactcgtcgtagatttccacgatgcgcgggctggtcttctcacgaccggcggcgcacagggcgatgagctggtcctcggactgaatcatgcagttgtagctggacttcgggtaggcttggcgcagttcgcgcacggcctgggccacggcctcgtcgagcgggaagccgaagccgatgtagtccagaatcaccgcgaagaagatagcggagtcggaacggccgccggtggagaggagcacgctgtggttcaccgggtatgagcggttggtgacgatgttgcggccattggcgtccgagatatcgccgttgtggatgaagctcaggccgttcgcatagaacgggtgctggttctccatgatgagcggcagattggagcttgccaagcgcaggtgccagatggcaccgcgagacggttcgtcggccagcgtctcaaacgtgctgtcatgacgggccgcgatggtcgacttgtagattcgggtgccggtttccggggtgggtgcgccaccgtcgcgcacgtgcggcgcttcggcgggatcggaaagctgggctacaccccagccatcattgtggatttcagacagttcacggaaatcctcgacattgtcttgccccaacacggcgttgagactcaggttgaaacctgccgtcgcgtatcccagtaatctgcacatggtatttcaacttaccgaaaccgtgcggcgacgtgcggcgaccgttatagccattctttatagagcgcatcagcgccgctgcaaactggtatgttatcgcttctgtttggaggagcgctgaggcttggcggcgggtttgccgttcttggccttgcccttatcgcctttatcgccctgctcagcgaccgcagcggcggcagcggtctcagcgatcttccgctcctcggccgatacggcggcatcgagctcctgtaccaatcgcccgagcccggacgtggtgtccatcgggtcggggacggcggccgggtcggccactgcacgagtcggcgtgggcgtcgtgatggtcttggccgtatcggtgcgcttcagacgcggtgggcggcgggtggagacgaacagcggctgcacctcgaccagcgggttgtaaggtgccagaccgaaccacttaaccggcgagccggccatgcggcggattgcgtacttggcttgcaacgacagggcaccgcgtgcggaaaccttggattccggcatcagggccttgtgaatcagcacgtaacggatggtgccgatgtccggatcggcgtcgaccttggggtaaatcgacttctgcttaggcagttcgccggttttggacaggtcgtgcatgatctggtggatgtacgccgggatggactgcgaaaccttgaagcccaaacggaagcgcacgcggtagatgtagttcgtgccgaagtcctccaccgagtattcacgggtgaacggctcgtcggtggtttccacgctgactgcccaccaagcacgggcacgcttggggtggtcggcgaagatggagaagaagatgtccgtgtcgagtcgcttggtttccgagtcggaggtcaggtacacgatgttgtccgcaaaatacgggatgcggaaatcaccgtgcagcttgtcgagcgcgggtaggaagtcgttgggccgcatgtgacggcgttgcgcacgttcgagcttggtgccctcattccacgtgtacatgacgaacagaatcgcggcggtcagcaacatggtgaaccaaccaccgtgcaggaatttggccatagacgcgatgaagaacatagcctgaatcgccaagaacagcacggtgaacacgatggcaccgacccgcttgccggaatgccataagtagacgccgagcaacacggtggtggtgatcatcgtaatggtcaacgccaggccgtacgcggcggagatgtgttcggaatccttgaagatggcgagcacggcgagcgtggccacgcacaacacgccgttgaccaccggaatgtacagctggccgcgcgtacgggccgggtaacgcacctgcagatggggcatccagttgaggcgggtggcctcggaaaccatggtgaacgcacccgtgatcagggcctgggaggcgatcacgccggccgaaacagacagaatcacggccaggtaccgcacgttcggggtcatcatctggaagaacgggttgagcgacttcatcgcggtgtattgcgggttatcgctattggccaacatccacgcgccttggccgaagtagttgagcaccagcgcaaccttgatgaatggccaggtgaagtagatgttgccgcgccccacgtggcccatgtcggagtacagcgcctcggcaccggtggtcgagaggaacacggtgcccatcagggcgatgccggcagcattgtccgggctgaacaggaatttgatgccgtacaccgggttcagggccgcgaacacagaccagtcgttagagagattcgtgacgcctacgatggcgaggaagctgaaccagaccagcaccatcgagccgaatactttgccgatgctttcggtgccgcgcgactgcacggagaagagaatcacgatgatcacgacggtaatcatcagggtcaggcttgggttttcgtcgaacaacccttccaatggcggcagggtctgcaagccttcgactgcggaactgatggaaaccgccggggtaagtaccgaatccgcaaggaatgccgcgccgccgagcatggcgggaatcgcgagccatgcgccgtacttgcgaatcaacgagtacagtgcgaagatgccgccttcgccattgttgtcgatgcgcatggcgatgagcacatatttgacggtggtgatcagcgtaatcgaccagaagaccagcgacagcatgccgagcacggcctctcggtttacgctgccaagccctccctgaccggcaaggaaggtctgcgcggtgtagaggggcgaggtgccgatgtcgccgtacaccacgccgagcgccacgatcgccatgccccaggtaaccttgtctgggctggattgcaagcgggcccaccatcggccgaggccgcctttcgaccatgcgctggcgattttctcggcttccttggtttcggcttccctctgcttggcgagtgcctcgcgctcctccttggtgagagtgcggcgggacaccttgggagcgttggtaaaggtgtcggccctcagcagtgcttcttcttcctgtcgggccttggctttggcggcgccagcctgggctgtctgggcctttgaggctttttgggcgcgtgcggtcctttggttcgactcagccatacgttcagtcctccattgaggtggagatcatccccctcgcttatgtcaggtacatcatggtagacctcgttcacaattctgacaaattttacaagtcaacacatcgccgcgacggccgcccacccggccctcacagtccgtatacggcgcgggcggtatcgcgggtgccgcgcgccacatccgcgatggacaggtcgagcgtatcggccatggcccgcaaggtgtaggggatcatgtacggcgcattggtgcggccacggtacggcatgggcgtcagatacggcgcgtcggtttcgaccatcgcatggcccagacccacaatccgcagcgattcgcggataccgtcgttgcccttgtagctcacggtgccggagaagctcagataccagccgtgttcgcgcgcaatctcggccatctcacggtcgccggaatacgagtggaatacggtgcgttcgggcgcgccgtcggccagcagggtttcgatgacctcgcgatgggagtcgcggtcgtgaatctgcatgggcaggcccagttccttggccagggcaatatgcgcgcggaaagcctcgcgctgcagttccttggcaccttcgccggtgcggaagaggtccatgccggtctcgccgatagccaccacttgctcggggtatgtggtggcgaggcgatgtacttcggcgagcgcgtcctcgaaagacgtgtcatggtaaggcttgtatttgagaggcagaccatccggccccggcacaccgcgatgcccgtggagcacggactcattggggtgtattgcgagcgccgcgtgcacgttacctggatgatcgagggccatctggacggcggtcatcaggtgcggcagctcgcaaccgcagtcgatgatacccccaatgccgacagattgcgcctgcgccagcaattggtcgacgtcgtacaccgggacttcgggctgccccttctcctgcgcctcatggctcatagcgcgcgcgaaagggattacggaggccacgtgagtgtggttgtcgatggtctgggcgtcgtccggcaatgcttcaggtgccggggcccagctacggtcgcgatggtggtgcttgctcatggtttctcagtgtaggctgtttctcagtgtaggctaccgtcagcaacgctcgtaaggcagtccggtaagacgttcgactacacgacgggtatcgccaatctcggccgcctgaacttgccgtctcttgccacgagcgcaacattcccgggaaagtagcgcaaccggcaagcgagatggccaccatcctgccgccttttctgcctcatcagcccattttctacctcattttgataaaatatgatgcagaaaagttcgtatgatgcagaaaatgaggcagtatgagatcattcgactacatcgaatactgatcgaacgcgcgtgttccgcctacacgcaagcaatccgagatggacataccgatccattgcttgccatcgccatgttcattctcgatttcacctgcatacatccgttcaatgacggcaacggccgcatgagtcggctactcacgctcctgatgctgtaccgcaatggctatatggtcggcaaatacatcagtatcgaacaccttatcgagcaaagtaaaagcacttattatgaggcgctggccgcaagcacccaaggatgggacgacaacgccaatgattatgcgccattcacgaactacctgcttggcatcatactgtccgcgtgcaaggaattcgacgaacgcatcaatctcacggcaggcggcagagcgcagggagcaccgcgagtagccaccaagggaacgcggattgaagcactgcttgatcgatccctagtgccactctccaaggccgatattctcgctcgtatgcccgataccagcaccaccaccattgagcgcacgctgaaatcactgttggactccggtacgatcatcaaaatcggtgccggtcgcagcacccgctatgtgaaacgccgctaaacgcatccttgtgcgcaacatctcgtcactcttccggcgctccgctggccacgcgaatcatcgcgtactgggactcgtagaggcggtagtacgcgcccttggcggcgagcagctgcgcgtgcgagccgtgctcgacgatctggccgtgatcgatgtagaagatctcgtccgcgttctcgatcgtcgacaggcggtgcgcgatgatgaagctcgtgcgccccttgagcagatgctgcaggccggcctgcagcgcctcctcggtgcgcgtgtcgatgttgctcgtcgcctcgtccaggatcaggatacgcgggtcggcgagcagcacgcgcgcgaaggcgatgagctggcgctggccggccgacagggtcgatccgcgctcctccaccaccgtgtcgtacccgtcgggcagttccatgatgaactcgtgcgcgtgcacggccttcgccgccacctcgatttcctcgtcggtggcgtcgagcttgccgtagcggatgttctcgcgcacgttgccggagaagatgaaggtgtcctgtagcatcacgcccatctgccggcgcagcgatgcgagcgtcacgtcgcgcacgtcgtggccgtcgatcgtcaccgagccctcggacacgtcgtagaagcgcgacagcaggttgatgatcgtcgtcttgccggcgcccgtcgggccgaccagcgcgatcgtgcgccccggttcgacgtggaagtccacgaggttgaggatgttacggccgtccttctcgtagcggaacaccacgtcgttgaagtcgacgcgcccgcgaatctgcggcaggtccgccgcgtcgggcttgttgcggatctccggcgtgacgtcgagcgtctcgaagatgcgctcgaggtacgccgagcaggtgatgagctggttgtagaagttgccgatgttgatcaccggattccagaagttgttcgcgtagccgacaaacgcgatgagcacgccggtggtcacgttcacgcccccgaagcccatcacgccgacgaagtagatgaacgagatggtcatcacggagatggtctgcacgcccggccacatgaggaactggatgtgcacggcgtgcatccacgcggaacgcacctcgccctgctgctcctggaaggtcctgaactgggcctgctcctgcgcgaaggtctgcgtggtcttcacgccggcgatcgactcgtggatgtaggcgttcaggttgctctgcttgttggagagcttctggaaggcgcgccgctggaagatctgcagcacgcgcacccagatgatgagcaccgggaacaggatcaagctccacagggccagctgccagtcgatcacgaacatcacgatcagagtgatcacgaaggtgaacacgtcggagatcacgttgatcagaccggagctcagcgtgtccgaaagcgtgttcacatagttgaccacgcggatcaggatcttgccgtgcgggcgcgaatcgaagtagctgaagggcagcgtctggatatgcgtgaagatatcgcggcgcatgtccttgagcatgagctggccgacgcgcgtgatcgccaccgtgcggtagcgcagcccgaactcgtacagcacgatcagcgcggcgaggattacggcgaggatgccgagcttgccgaggtccttgttcgggatcgcctcgtcgatcatgatcttggtcaggtacggcacggcgacgacgatgcagctcatcgagatgacgacgacgagaatgcgcgccacctgtgccatatacggtttgagatatttgccgacgcgagcgatgtcgtggaggttgatggactcctccagctcctcatcctcgcggaatgtattgcgttgtgccataagtcctcttctaaaacccctgtgcggcgccggactggagtccgagctgcttgtggtagatgtcccagtagcggccgtgtgcggccacgagttcggcgtgggtgccgcgttcgacgatacgtccgtgctcgagcaccagaatcaggtcggaatccttgaccgacgagatgcggtgggcgatggcgacgatggtcttgccgccgtccatctccttgaggtgcttctggatctccgcctcggtctccatatcgacggccgaggtcgtatcgtccataatcaggatcgacggattgtccgcgagcgcgcgggccagcgacaggcgctgcttctgcccgccggacaggcccacgccgcgttcgcccacgacggtgtcataaccctgcggcatcgacctgatgaaattgtccgcgccggcgatctgggccattttctggatatatcggtcgtcgctatcatcgctggcaccaaaaccgatgttgccgccgatggtgtcggagaacaggaacgtatcctgcgccacgatgcacacctgcgagcgcaaggtggtcagcggccagtcgcgtgcgtcgatgccgtcgatgagcacatggcccacggtcgggtcgtagaagcgggagataaggctgacgagcgtggacttgcccgcgccggtttcgccgaggatgccgagcttggagccggcgggcacggtgaagtcgaggtccttgaggatcggggtctccgggtcgtccgggaaggcgaagctgacgtggtcgaagcggatgtcgcccttgatgtgcagcgggcaggacttgcgttcggcggactgctgggcaccggatgttccggaagccccgggcgctccggtagccccggtagcctcatcatcgtgcttgacttgctcgacaatcgtgaccgcctgcttgacggcttcgaccgcgtcgggcttctccacgatgcgcggctgttcgttgagcagcttgcggatcttgatgcagctggcgttgaatcgctgccagtcgttgatgagccagccggactggcgcaccgggccgtcgatcatccacaggaaggagttgaaactcaccagattgccgagggtcatgtagcccttgatgaccagaaagccgccgaggccgagcgtgatgagctgcagcgagaagccgaggccgtccagccagggcatgtacctgcgcgagttgtaggccagggccatgttgcgctgcatgtagtcgtcgttgtgctcgtcgaacttttcggtctcgtacggttcgcgcacgaatgccttgaccacacggttgccctcgatgttctcttcgaccatggagttgagggaggccagcgagttgcggatggcgaagaacagcgggtgagcgtgcgtggacaggccgcgcgtgagcacaaaaatgaacggcgtgacgcaggccaggacgagcgcgagtcgccaatcgatagcgaacatcacgcacagggcgcccacgaacatgaccacgcagtcggcgatctgatagctcacccaactcaggcagtggcggatcgcgtcggtgtcggaggtcagacggctcatgatgtcgccggtgcgtgtgtggttgaagtacgtgaagtcgagctcgtgcagcttctcgtattcgtcggagacgaggcggtagaccgagttctggccgaaacgctccatccacatctggtagccgtatcgcgcgcccacgcggatgatggtcatgaggatcatcagtccacacagacgtggcagttcgtcggcatgtccgccgacgatgacgcggtccacgatgataccggacagaatcggaatggtcagggccatcgtgttgttggcgatgaacagtaggagcgcgcctaccacgcggggcaggtctggtttgcaatatggcagcacccatttgagattgcttgcgctggtatcgattcccggatcgacgtacatgtgaggagatcaccgtttcttggggattgtttgcttgtggtatggtgcggcatgctcctgcgccgcacgcggcaatcgctgccgccgcgattcacgatcagccgtgcttcgcactgcgcctgtcattggtcgcatgaccggagctctccttcatcggtcgaagcacgttcgactttcgcaaacgcgtattagtctagacggcctgcgtccaatcgcaacagcctgcaactctgcgtgttccccgcattagcaacgcggcacgacccaattcgcgacgcattccccggaatgtgtcgctgcgcccccaaacaggcccaattcgcgaagcagtccctggaatgtgtcgcgcgaaacgttgcgcatgcggcaatgcacgctcgagacctgttgcataccagtcgaccaaattatagaatcataattaagtaaattacgattctataatttgcgcgtgtgcaccagggcagacagcaaagcaaggagacaagggccatgttcgtcgggcgagataaggagctttcggcactggaacgccgctggagctcacagcagttcgagtgcgtcgtggtctacggccgtcgccgcgtgggcaagaccacactcatcaaccgcttcctcgaagatcgccccacgattttcttttcggcaatcgaatccagcgcttccaagaatctcgaatcgttaagccgcagcattgctctgtatgaaaagggctcagaggcgttcgagacaacgcccgtataccgcagctttgaatccgcactggaagcggtgttcgcgctggccgcaaagcaacgcatcgccttcgtcatcgacgagtacccatatctggctaaagcagaccggaccatcaattcggtcctgcagcatgccatcgaccgccataaggatgacagtcagctcatgatggtgttatgcggctcttccatgtcgttcatggagcgccaggtgcttgggtatgagagccctctatacggcagacgcaccgctcaaatcaaagtggagccattcggctatgccgatgtccgcaagttcttgccaagatacagcaacgaggacgctgctattgcttacggacttaccgacggtatcccgcagtatcttcggcaactggacgacggcatcagcatccgagacaacatccgttggaacatcctcgacccaagctgctatctgtttgaggagccagacaacttgctgaagcaggagctgcgcagtccggccgagtacaacgccgtaatccaggccattgcctccggggcatctcggtcgaacaccatcgccgccgcatgccatatggaatcgtcctcatgcgccacctatttgcgcaatctcatcgatctgggaatcgttcgcaaggagacacctttcggcgaggacgctcctcgcaagacgatctaccgtatcgaggactcgttcttccgattctggtaccgatatgtgccgaacaacatgtccctcattcaatccggtcatgccgatctcgccgccgaccgtgttatgcgcactatctccgactttatggggcaggtgttcgaagacatctgcgttcagtggatatggtcccataacggtaccgaggcattgcctttcctcatgcttgatgccggacgttggtggggcgccaatccgaccacccgcagtcaggaggaaattgacatcgtggcttcaggagaaaaaccgaaaactctcctattctgcgaatgcaaatggcgcagcgtgtcatccggtctgcagcagttggaagtgctgcgcaatcgcgccagactgctgcaccccgaaaccagccattacatgctgttctccaaatcaggcttcgacgagcatgtcgccgcccgcgcggcgcaagacggtacagtgacgcttgtcgattttgcggatatggattagtcggttcactccattgcggacggtaagggtgaagtaacagggctgggtcaatggaccgaacctctaggacgggcaacagacccaatccgcgacacattcccgggaaagtggtgcgcgttacatcacgctcaaacaacccagcatgtatatgggcaggtattcggctcgtccaacagtctccacgttgccatcatggaacacgtaggcatgggcaaaccgataattgtcggtatccagtaggttgttcatggcccgatgccgcgtatagtccttgcccgatttgatttcaaccagtgaaatatcatccagaccttgctgcactacaaaatcaacttcaccaatacggttctggttgaagtaatgcagttccaatccctgtgcaaacagttcctgagccgctgcattctcgaaaatcgacccgtaattcatactggatcggtgattcacaatctctaagtccacactgcgcatcaaacgggaggtcagcaaaccgacatcgttcatgtacagtttaaacgtgttctcgtcggcatgctccgtcagcgggtattcagggtcctgcacgcgcgaagtaggcaaggcaatacctgcgttcgccaaccaatcgaacgccgtctgcatatgagcgaacctgatattcttgcccaacttggagaacttgaatcgtttgttttccgcattgagctgacttggaatcgcctcgtaaatgctcttgatatgacgacgttccaccaaatcggagacatatttggtgatgtcgtattcataggtatcgaatatggcttgctgagtattgcggaccttgacaatatcggcaaaatccacgaatgactgcactgcgtcgggcatgccaccaatcagcagatacttgtaccacaggtcggtgagccgttcatgtagataatcgggaacctcccgtcgatccacataacattcacgcagcgtatcgaaagcggactgaggcagccggcatgcagcgcagaactcatagaaattgagcggatacatacgcatcgtctgcaggaatcccaccgggatcgagcgcacattgaacacgtcaatgcccagcagggagccagaaacaatgacatccaatcctttggtgccagacaggaatttggtccacgtgagcatgtcctcacacgcttgtatctcgtcaaaaaacagcagagtcttgcccggcgtaatttccgtgccggaaagtaccgataaccgcagtatcaggtcttcggcgtccttggccttgcttaccgtttcgaccgcctgaggcatttcgatgaaattcacctcagccacatgctcataatggtctgcaccgaactgctcaatcagcgtggtcttgcccacctgccgggcacccgtgaccaacaagccctgcttggttttacggttcttccaattcagcaactggtcgtatgcatggcgcttgagcatattcccctcctcttttgtggagaatgactgaaaacacgcaggttatcacataatcacatatcgatatcatcttagcattcacgtttttacatatgcaaaacgcactttgagtcacaaaaaacataagaatagtgagtggttcattcacgttttacgtattgtgcgccgggtcctgttcgagcagcacgcgcggtccgcatgacggcgccaccaccaccgatttccgcaccttctccgacccggtcaagtggattgaccgcaagaacagcgtcatcgattcgaccatgctgcgagacgatgacggctggtggtaccgcgcttccaaggacgccgaaatcaccatcgaacgcacgcgcaatccgtacacctccgcctacgaggtgccgcgtaccgacgacgaccagcagtggtcgtacgtggggtcgctgactgacattctcggcaatgaccgttactcctggatgtacctggaaggaccggaattgttccgctacaacgatgccgatgtcaagaccattaacggccgcaagatgcgcttcggtctgatgtgcgatcagtacgccgaggccgccttcaagctgtaagacttaaggcttcaccactacaggccggtcgcggaccatatcccaagtcagcaaccggccgaaccatatctcgcggcttcagtcatccttcatcatcagtattcggtagcggccctaaatcagctccgccatccggctcataatcactcgccaaccacgggcggaagtagctcccgactatccacagtgggacattggtcagccaatcctgctccttgtaattccgcatcgacgtacggtaaccgcaaatcccgtatttgtcgcacagccacttcaagctacgcttatgacgctcggtaccagcttcggcctccaacggaatgattgcgccattacctgcaaagacaaaatcaacttctcccgtactgttcgcattcgaccagtacatcggtgtgatgccggcggccactaattgctggcaaacatactgttccgttaacgcaccacggaattcggtcagcccgtcatcaccaaggaccacgcttgcgggagtcagatccagggccgctgccagcagcccaacatcatggagatacagtttgaacgcggaatcatcacggtatgacggcaatggtgccgcaggtttttcgacgcgatacacccgcaacgcaagaccaga

SEQ ID NO: 2955 - DNA, 6146 bp, Unknown
  R19_24m  MAG No. k141_6875
cggctggcggcggtctcctgatcgccagtcagacgggcaacgccctggttgatttcggcgctttgctcggtgatggccaccacaacgccgcaggaatcggcgtcaaggccgacttcggaggaggtgtagccgatgttgcgcagggtttcgcggaccttggactgcacgtcgcagtaccccttggacgtgacttcgccgaagaccaggaacacgccggtggcggcggaggtctccacggccacatggctggacggatcctgggccagcagatcatcaagaatggcgtcggagatttgatcgcagaccttgtcagggtggccttcggtcacggattcggcggagataagccgatgttcttctgtcatatcatccctttcttcaggacttatcgccccgcggggtgcgaggcacaatgatacggtgtcaatttttacttgtcactgcggaagcgggcataaataaaggcccgtgccaaccagcgcggtggctcgagccttacgtcttgttcgctcctgatgatgagttatagctgattgcgataactcaggcaagcgtgtcgctcaaaatcagttgtgagagaactctcacaccatcattcggcgacgaactgtccaaacaatccaaacgaatcgtctgaatcgatcagttgccctcgttggcgtcgtcctcgcccaaggtctcctcaagcagaccctcgtcgatctcgcggaaggcgatggacagaggcttctcgttgttctggtattcgaccagtgggccgacgttctgcagcaggccctcgttgagctgcgtgaagtaggagttgatctggcgtgcgcgcttagcggcgaaaatggccagcgcgtacttggaatcggcgtgcttcatcagatcgtcgatcggcgggttcgcaagaccgtcgggtgtcgggtcagtaccaaaagccattgttcttatctccaaacattggaaaatctatctcaaccgaagcaagtgtagccgtttggggggacttctgtcagccctataccggactctcgccagaggaatgtattccaaaaaaatgtgtgagaaacattacgtttttgcaaattccattattcgactcttgacaaatggcgtgtccctcgcaaaggcttgaatagaaccatgactgaaatgcgatctgcaaaaattatgtcagggcgcgtctttgcaggcgcccgagccctctaccgtgctgcgggcgtcagcggagacgacatgggcaagaagcccatcatcgccatcgccaactcgttcgatgagttcctgcccggccatgtccacctcaacaaggtcggccgcatcgtttccgaggctatcaaggaagccggcggcattccgcgcgagttcaacacgatggccgtggatgacggcatcgccatgggccacactggcatgctctactccctgccttcccgcgacatcatcgccgacaccgtcgaatatcagtgcaacgcgcactgcgccgacgccctcatctgcatcccgaactgcgacaaggtcgtgccgggcatgctgatggcagccctgcgcctcaacattccgaccgtgttcgtctccggtggcccgatggaggccggcaccacggtgctcgccgacggcacagtcaagagcaccgaccttatcgacgtgatgtacgccaccgctgacgacagcgtctccgatgaggaactgctcaactatgagaagaccgtctgcccgacctgcggctcctgcgccggcatgttcaccgccaactcgatgaactgcctgaccgaggccatcggcctggctctgcccggcaacggcaccatcctcgcctcccactcctaccgcaaggacctgttcaagcgtgccgccaagcaagtcgtcaagatcgctcaccagtactacgacgattccgacgattccgtgctgccgcgctccatcgccaccaaggaagccttcgagaacgccatgaccatggatgtggccatgggcggttccaccaacaccgtgctgcacatcctcgccatggcccagtccgccgacgtggacttcaccctggacgacatcgagcgtatttcccacaccgtgccgtgcatctgcaaggcctcgccgtccggcaagtgggagatttccgacgtgcatcgcgccggcggcatcaccggcatcctcggcgagctcgaccgcgccggcaagctgcacaccaacgtgcattccatcgactacccgacgctggaagccaagctggccgattgggacatcatgcgcccgacctgcaccgaggaagcccagcagatgtacaaggccgctcctggccacatcatctccccggagccgtggacgcacaccaccctgttcgactcgctcgaccgcgaccgcaccaacggcgccatccacgacatcaaccacccggagattcacgaaggcggcctcgccgtgctgcgcggcaacctggcccccgacggctgcgtggtcaagaccgccggtgttccgccggagatctggaagttccgtggaccggctctggtggtcgactcccaggagcaggccatcgaggtcattctgaacgacaccctgaagcctggcatggcgcttgtgattcgttacgagggtccgaagggcggcccgggtatgcaggaaatgctgtacccgacctccttcgtcaagggcaagggcatcggcaaacaggtcgccatgctcaccgacggtcgctactccggcggttcctccggtctggccatcggccacatggcgcctgaggctgccaacaagggcccggtggcgctcatcaagaacggcgacatcatcgatatcgatatcgaagcccgttccgtgaacgtcgaactgactgacgagcagctggacgagcgtcgtcgcgagcttgaggctggcgacggctacgtggctcaccgcaaccgccacgtctcccaggcgctgaaggcgtacgccgccttcgcccgctcggccgacaagggtgcgacgcgtgacccggagctgatcaacaagctctccggtctcaactgatcgccgattgcatagctgaaaggcccggcatcttctttatgaagatgccgggcctttactgtgcttccgaaggcgggagcgatattgcttgttatcgcacgcaggcggcgggggagaggcgtgcgcctcgggcccagtcggcggcgcgcatggccttcttgccttgcgccttgacttgggtgagttccagcggcgtgctgccggtaccaacccacacgttcttcttgcccaccttcagctcgccgggctgaaggtcggccggagtgttgggattggactggtcggccggttgtgcggcgagaatatgcagggcgagggatttagcggttgactcgtcattatcggcgattggcccttccgcaaacagttcggtccatgccccgggatgtggcgtgcaggcgcgaatctgacggtcgatggcctcggcctcgtccgtccaactgatgcgggcgtccttcaccgtgatcttgtgcgcgtattccaggctctcggccggctgcgcggtgaatgtggcggtgccttcacctacggcggccagcgcatccacatacatgggcgcgccttcctcggccagacggtcaagcagttcgccggaagtctcacggccggtcagttcgatggtcagggaagcgacgatcgggccatcatccaaaccctcgcccaccttgaacacgtcggcgccggtggtcgggtcgcccgcccaaatcgcacgctgggcgggagcggcgccacgccacttcggcaggttggagaaatgcaggttgtaccagcccatgggcaccgcatcaagcacgttcttgggcaggatattgccataggcgatgacagcggcgatatccgcatgcaggtcgttcaacgcctccatgaattcgggggagcggggtttgagatcgatgacgggcaacccgagctccagagccgtcgccttgaccgggctgggcgtgagcttgcggccgcgaccggtaggcgcatcggggcgggtaatgacgccgaccacatcaaaacgtggatcggtggcaaaggccttgagcgagggcaccgccacgtcgggggtgccggcgaacacgagtttgagcatggtcctccttgaaatgtcgatgctcactgcacggccggaatgttcacgccattggcgatgagcagttcacgcagcttgaccggatcctggaaacgtacgccacggatgccggccgcattcgagccgacgatgttcatggccttgtcgtcgatgaacaacgcgccatcggccttgatgccgaactggttcaacgcggcctcgtagatttccttgtgtggcttgcgcagcttggcaaaaccggagacgagcttgccatcaagctgctgcagaatatcgcactgttcctcggccacgtggaacagactggattcccagttgctcaggccccacacgccgatgccggcagccttcaggtcattgaccagcacgcgcgcgcccggcacgatgccggtcagggagtcgcggaagttcttgatgtagtagtcgaggatgtccgcccacttatcgcccttgtcacggcgcatgatggcgatggcctcgtcggtgctggtgccgccgtccatcaggtcgttgacatcgtagaagccggagatgtcgttgtcgaggaattcgtcgatggtcttctggctgtagcgggggatgagtacggcgaccggatcccagtaaatcagcacgttgccgaaatcgaagatcacgtcggtgatcggcttgccggcgttcgcagcggcctcgccatccgcgaccagcacgtcgtaatccatatccggctctccaggccaacccttcatagtgtcctccttctagcgatgttcattctgtaattatcgtttcacgtgttgaagacgattagatcaggtccttgggatctactcggaagcgaagctcgccgggttcgcgggacgccacatgacgagcggtttcccggtgcagtcgggccgccagctcggctcgccgactctgcggcacacggattactgccttcacccggtcggccgtggcttcgagctcccgggcgtcgaccgtgtccggttgcgcgatcggcaccgggcccaacatgccgggcagctcgccgcaggccgtccaatcgccgcccagcgcgccgatacgctgcatcagcgtcatcaccgcatcacggcgtccccatacgcaggcggcggccacggccggcggcataccggtctccacacgctcctcaagatccttggctgcaagaatcctcgaatcccagagcatcagcgattgggcgatggccgggtcggtttcgccgagaatcaacgcctggccgccacgggaacgcggcgcgcacaacgacaccgcacgcatccacgcggtcaatgtatccaagcgagcatccacgcccaacgcatacaagctggtccaagcgtcgagcacggccacggcacgatactcatggccagccgatccctgctcggcactgaccggacgcacgcgcggttcgaaaccgggagtggcgatgacgatcatcggctgacaagccacatcgcgcaccaggccctgcgtcttgctggacaaaactactggcacgccgcggaacaacccggccagttcagccgcagtgcctgcagcacccacgcgcaccacacgcatacgttcatgcccacagcccgggcacttccaattgatggcagcagccccacaccagcggcatcgcggtgtggaatcccggcggtcggccggtagttgcaatggtccggaacacttggcgcagcgcgcctgacgatggcatttcgcacaactcagagtctcactgacgctgtcttgcggaatggacagcagcacggggccgctctccaaagccttagatagcacgcggacggccgtatgcggcacgcgcgccccgatggacgggtcggcaagacgcgcaagttcatcgcgattgagccaacgcacccaaggagtggcgtccttcagcggcgaggcgagcggatgaattgtggtggaatagccgctcactggggtctccactgtacctggaccggtgttttcccactggctttgcggggtgcgcgcattggccatggccacgaacacgccgccatgggacttggagcgcagccgcatcacgccacgggcctgtggatatggcatcataccgtccatgttctgataggcggca

SEQ ID NO: 2956 - DNA, 6046 bp, Unknown
  R19_24m  MAG No. k141_6891
ccctcggacaatctggtgatggtgtccagatcctcttgagtcagcggtcgatcgccggtggtggtaatgggcagtacattaatcgcgggcaggccgataatggtggtttcgcctgcgctaggaatcgggttggtcataatctcctattctaccgtctttgcatactggttttgcgtagcttcgcgtacttcgtcgataatgatgctgtcagaaggctgtacgttgacgttggacccgtatttcacctggagctgagcacccacgccgccggcgatatcgactgcgttggacagttcctgcggattgccaatggccttcactgtgtatgtgggcttgatggtggtgccatccacaatcaaaccttcctcggcgtcctgaatgtaggtggaggtgatgacgcgcacgttattgatggcgattacctcggcaccggcattgcgaagttcctcgataaggttgaacatgattgaggcgtccactttagtcgtcgagcctcgtccgattcggatggtcacgccttgaccctttgccgggagtctgccggaaatcaagccgctggtctcctcgttttgcttggcgatcttacgcgcctgctcctgctcgttagccgccgatttcagcgagttgagctggctgttcaactgggttttacgctgctcgagattggagatctgcgtattcgactcgttcagcagccttaccagttcactctcgtccatcgtttcgtacgtggatttagtgttattgatctggctcatgtaggcgaaacccaacaacgcgcacatcagagcgatgagaatcgaggatagtaaccgtgatttgttgctggcacggttgagatccttccggggcttcttacgcaccgtgggaaacgacccggtttccatccggtcgttgaccttgtcttgtacatgctggtcgcgcattttctccagcatgttgtctgattgtgctttacgtgccatacgtcagtacccttgtcagcctcggaagatgaagcgtctgatcgcggacacgttggagaagatgcggatgccgagtacgacgatgacggctgtctgcagctgcgaaccgacgccgagctggttgccgaggaacacgagcagtgttgccgtcaccacgttggcgaggaaggagatcacgaacacgcggtcggagaagctgcgctcgaaataggctcgcgcggcacccagcagggcgtcaagagcagcgaccaccataatcggcagatatggctgcacgatgatcggaatgtccggcttgacgaacacgccgatgacgacgccgatgatcagtcccagaacggctgccattattcattcctttccgcgtacttcacttctccagtgactgctgcctcaagtgtaatcgaattggatttgctcacctgcgggtagataccggcttccttgaaggaatcgtaaagacttgcaagtctcttctcccccatcgcttcggccaaggcgctcttatcgcctatggcttcaatggtataggggctttgtatcgcggtcatgccgatgagaatatgcccgccggccttgcgtatcgaggtttgcgcgccgagcctattaccgttgatggcaatggcttcggctccgttttgaaacatcagggagaccagttgttgcagatccagatcggtgatgactcggatgttcgtggaggtgccgattctcgtcgaggaggattgatccgactggcttgccgcgattggatcggccagcgtcatggtgattccttcgccttcgaccaccgtggcaccattgaccatttcgtcttggataagcgtgtcgcttttcacgctgccggagattttcttggactgttcgtcaacttgggatcgcaaattattgacgtccgtggtgagttcgtctatctgcgagttgcgattctccaattgcgtggccaaagtctgccgtacctgcttacgcggatcggattgcaactgttgcacgaataggctgcaggcaaagccaacgccgacgcagatgatgaatacgacgatgcgattaaaccagatggagaaggtcgaacgatgctcatggaccagtcgtgagtcggagaacatcggatccatcggacgattgacaagatcatcgatgagctgaagcgaatcgtcgttggttttacggcgacgtctggtgcggatggcggcggcgtcatccggggaaagcgcatgatgcgattccgcgcctcggactgagtgggagaacacggcgcggcgtcgtaccggctcattctccttgggtatggggaacgagaccggggccgtggcctcaagcgccatacttctcccccagttccttgcgtagcaatccgacgccctgcttggtatagatatatccggcgagccaatacatggcgatgccccagatgccggcggccagcgcggcgatgtagagcaagtggaagaacgtactggtgcccaaatcggcgaaaataagaccgacgatggaaatcatcagcagcgcggtaccagccttgcccacgaaatgcacgggcagcggaccataaccgtactgggcaagccatagcacctgaatcgccatccacagatccctcagtcccacgataatcagcatccaccatgggatgatgccggcgacgctgagggccagaatcgagcagaaaatgagcagtcggtcggcgatcggatcaagaatctgaccgatcttgctcacttggttgaatctgcgcgcgatgatgccgtcgagtccgtccgaagccgaggaaatggcgatcagggctagcgccgcaatcacctcatgcttggagatcagcacgctgatgaaaggaatcgagatgattcgcagcgcgctgatcaaattgggcacggtgaaatagatgtcacgtgcttccggactgtatctggcgttgactttctggttggtcatatcgactaacagtctacatgcgggaggcttgcagagcggtaacgatgatgccgcgtgcgccgacttcgtacaaatcatccatcagctggttgaccttggccttgggaaccatgactcgcacggcgttccactgtttgtcgtgcagcggggagatcgtcgggctttcaaagccgggggtcacggccacggcggcggcgaccttgctgatcggaatgtcatagtccatgagcacatactgatgtgcagtgagcacgccttgcagacggcgggtcagcacggccagacgcggatcctgctcgttcagacgcggcgagcgaatcaggcaggcttcggagtgcatgagcggttcggcaaacacgcgcaggccggcgttgcgcagggtggtgccggtggagaccacgtcggcgatgaggtcggccacgcccagctgcacggaggattcgaccgcaccgtccaggtggatggtctcggcctggatgccgtgctcgaccagatagtcgtgtacgagcttatcgaatgtggtggccacgcgcttgccctgaacatcctccagagtggtgatcggggattcgttcggtgcggcgaaacggaaggtcgaggcaccaaagccgagcggcatgtgctcgagcgcggcggtaccggagttcttgagcaaatcctggccggtgatgccgacgtcgatggcgccgcggcccacgtatacggcgatatcgagcggacgcaggtagaacagctcgatgccattgtcgggatcttgcacgaccagctggcgagggttggtgcgcagacggtagccggcctcggccagcatgttccacgcgggttcggatagcatgcccttgttgggcactgcgattctcagcatttgcgttcctctcacaggtgcttgtagacgtcctcaagcatcaggccgtgcttgatcatcatgacctggacgtggtagagcagctggctcatttcctcggcggtgcggtccgcaccctcgtattcggcggccatccaggtctcgccggcctcttcgatgatcttcttgccgatgaagtgggtgcccttgtcgagctcgtcgacggtcagggagccttcggggcgggtctgggccttttcggacagttcggcgaacagggattcaaacgtcttcatgtgattcagattcttttcttgcggttatggatgaaaggtggattgcggttcaggcttggagctcaggccttgaacgcggcctcggccttggtgcggatgtcgtcgatggcctgggcgggattctcggcgccgtacacggcggaaccggcaacgagcacgtcggcgccggcctcggccacgatgtgcgcggtcttggggctcacgccgccatcgacctggatgcgggtcttcaagccacggcgggtgatctcatcgcgcaggcggcggaccttggccatctggttgtcgaggaacttctggccgccgaagccgggctcaacggtcatgatgaggaccatgtcgaactcgtcgaggatatcgaagatcggctcgaccggttcggccggacgcacggcgaagcaggccttgcagcccatctcgcgcagctgtcgggccagacgcacgggggcgtgggtggcacccatgtggaaggagatggaggcggcgccgagcttggcgtattcgggagcccaacggtccgggtcctcgatcatgaggtgcacgtcgaccggcagatcggtgacctgacagatgcggccgacgatcggctcgcccagggtcaggttcggcacgaaatgatggtccatgacatcgacgtggaccaggtcggcgttggcgatggccttgagatcacgttcgaggttgcagaaatcagcggacaggatgctgggtgcgattgcgatattgctcatggtttcctaccttatctgtgcaatgggacttggggtcccgtgtttcgcgctgtttcggcgctgtttattgtggtgtcacttagtgcgcttggcctgctccttctggcgaagctgttcctcttcgatgctctggcgttcgagctcgtcggcggtgaccgccgcaagcccgcgcgcctgcgccttggggtccggaccgtactggtagagcacgacgaacaggatacagccgagcacgaagacgatgatcgcggtccacacgttggtcctcaggcccaggatcaccgtggagtagttgatgcgcacgttctcgatccaggtgcggcccaggccgtaccacatcaggtacatggcgaactgctggccggccttgagccggtcggcgagcttgtggccgaggtagatgatgagcgcggcgccgatgaggttccagatcatctcgtagaggaacgtcgggtggaacagcgtggtcctgtagtccgggcattgcgcgccggaatagcagatttcggatttgccgatggcgtccgcgtcgttgagcttcaggccccacggcaacgtggtgggccagccgtagagttcctggttgaaccagttgccgagtcggccgatggcctgggccacgggcagcgcgggggcgatggcatcggcgaagatcgcgaacggatagtgcttgtggcggcaccacaggaacgccaccaaggtgccgacggagatgccgccgaagatggccatgccgccttcccacaccttgaggatgttgaccaagttgccggtgggcgggaagtagtcggccggcgtggtgatgcagtggtagaggcgcgcgcccaccagcgcgcagggcacggtgacgagcgtggcgtcgagaatctggtcgaaggtgccgccgtaccgcttccaacgtgtggtgaggatccatacggccacgcagatgccgatcaggatgcagatcgcgtacatgtggatagtgaacgggccgatctcgaacttggagaaggtcggcgagggaatataagccagattcatcgtgcctctacttgctggtgctcatggtgtgtccacgcgcgggttgtgcttgatgctctgtgactaccctaccgtgtcacggcacaacccgcgtgaggcgcaccgggcgttcaccgggcgttgtggatgccttcggccagttcctcgctcttggcggcgagcagcttcaagccttccttcgggtcgcgtgcggtcttgttgtcgtccgcgagcagggtgtgcacgagcgcggagccgacgatgacgccgtccgcg

SEQ ID NO: 2957 - DNA, 5749 bp, Unknown
  R19_24m  MAG No. k141_6905
atgtcagcggaaagctgatcaggagccgcagcagttcccgacaattgaaccccctttcttcttctctctcctttctctccccggcgggcaaccgccggggttcttttttgccctgaatcattcccccgaatgaccgccattcccaagccatagcggtacactggctgtgtaatcggcaggaaggggggcaccgatggcccgcaacgatgaggactacgatttcttcggcgatggtcagtatgacgattcgcgcagctcacgtcgtgcacagaatcgacgcccatccaggcggaatgccggccggcgattcgccgctacaaaagtcagcagcccaacgtcgatattgtgccgcagacttgccgttgtcagcggactgctagccgtcgtggtatcggccacctcggcggttcatgaaatcgcgccttacgccattttctttatgacggcagtgccaggacgatacattgcgttgacggcggcggtgcttatcagcatcaccctgatgctggtcatcgctgcgcgagtcaccatgcctcggtacgccactcacgggggagtgggcgcgggcggcatcatcgcactggtgtgcgccatagtttgcttggttatcggcgtggccatgggcgtattgttcccggaaggactgattcagcagtcgaacgacaaggcacccgtcgaagatgccgcacagatggagcaaggcatagaacaagctgccggcgcgtgcaaagaaggatggcaggggcttgatacgggcggtttgccaggcatcaccaccgtacagatgtgcactgatccgagagtggccttcgtgtcctttgaatcggaaacgtccgcagccatcagccgggcacctatcgaaagcaagatttccgaactgctgagccaatacgctgataatgagcaaacgaaaggcgattggcgattgctgaacggcaaacgctggatggtgttcggcgagggcagcaagatgaccgcactgcagcagcagtggggcggcgaacttgagacaatcaccgcagccacagacaccgcagccgcaaacaacggtaatgcctgacagattgccggtatcccctggaaagtcccaaggcgattcggcgcggattacccaatgtgactgaaatcatggtccatcgttttccgcacagcgcgcaagacctctatattggattggtatgagcaaagaagcgaatgccagccagcctctgatcggccgcgaatccaccactgtgcctggacgttttggcgagccactcaccgtggaacacagcgtcacctcgcgcggcggcttcgaccagcatgccacgcatccgctgttcctgtgcctgcatggatggggatccagcgaagaagacatggcggacatcatgcgcctcatcgctccatataacgacttcgtggcattgcgcgggccgctgacactcgcgccggcccgtgaaggcagtcccgaccccggcaactacgcgtggtttcacgatgccctgcctatcggcgatgatcgtgactacgacgcgtatgccgccgccacagcagtcgaccgatgggtggccgacaacattcccgccgaccgtgacgtggtgccgcttgggttttcgcaaggtggactggtcgccgtgcatttgttgcgcatcaaccccgagcggtaccgggccgtcgtctccctgtccggcttcaacacacccggtcaggtgcccggcacggcccccgccgactctcgcctggccgattacgatatccccgtgttctatacgtacggcaagaacgatggcgtaatcccgaaatacgaactgttcgccaccgccgcttggttggaagagcatacgtggctgaaaaccaagagctaccacggtctggatcacaatgtgagtcttgaggagttcgccgatttgcgccagtggctgctcgacaacgacattacctctggcgtgctgtagtcagccgccatcactggagttggcgcggccgtcgcagcaatcggacatcgagggcgcttgtggccggcgcggtcatagactgttctcccatgagcgaagtgagcactgcaagcactactgcacatactgaagagaatcatacggaaatagcaatccccaacttggctcccctcagagaagggagccaaggaaactagatgccggaatcggcatcgacctgcataacgtagatgttgcgcctcagggagcgggcttgggctcggttgatgtcgccggcttcgtacatgtcctgaatcacaccgagttcgataccgtagctctcgcgctttacgtcctcgacctgcgtgatggtttccgtagtgccgctcatattcggacgtgcctgcaatgaagcctcagcgcgacgataatccagcaacagcgccgaacaatgctcggtgttgtacgtatcctggcccatctcgtcaataagccggccgataacatgatgaatcgcctcgacctgcagttcgcgggtgcgcgcgaaaatctgatcctcgctcaccaatggtgtggtatggcgaatcttggacaccgtgcgtttggcgtaattgctcatctgccgctggaacatgcgtaagcgaccgcgaatctgcgataccgcatgccccgaagtcggatcagtggaagtgtgacgcagcgtattcataatctggtcaagcatgcgctcgcaggcttcgacgttcagctcttgcgtggccgtatccgccgccggatgcgccttggtgtcggcaagtcggtcgcgcacgaattccttttcccaatgcagcgcttcgatctgcaattgctcgaatccctgaggatcggtatcgccgatgcgctgctgcaatcgtccgatgcgcttggtgtattggtcgattaccatcagaatcgcacggcgattctctggcgtgatgcgtccggtcaattcctccaccgtggcgcgtaacacatcgatggtcaccggaatcatttccgcgctgggatccttgccacggttcggggccaatagcggtaacaggaagttggccagcagcaaggtcacgataatcacgcctgacgcaatgaaaatcagctcgtcacgcatcgggaacggcgcaccgccggcaatgtaatacgggatggtaaacatcaatgacagcgtgatggttcccttggggccgccaaaggtcatcactgcggccgagcgccagcgttcgggtgtcattttgcggcgctggccggtgattgtatctcgcgcaacgcgcagcatggccgcaatccagaagaatcgaagcgcgattaccaccagagtgaccagcagaataatgccgatcagcacggtattgctgatatacgggtcagaccagctggccctcatggcgcgcggcagctgcatgcccagaagaatgaacaccgcaccgttgagcgagaaactcagcacaccccatactgaagtggaaacgatattcgtacgtgccacattcggccccacgccggtacggtcgaatcggatgaacaggccagcggccaccaccgacagaatgccggacacattgaattcctccgcgcccaaatacagcaggaagggcaggaacagttccatcagaatacgtgtggtggtggtttcccaaccgagggatcgcacggtctcgaatagccagttggccgctgctgctatcaccaggccaaataaggtgccgccaaagaaggagatcacgaattcgccggcggcctgccccacggcgaattcgccagtgaaggcggcggccagagcgaactggaagccgacgatgccggaagcgtcattgaagagtgattcgcctttcagcacgctgcgctgacgctgcgtcagcgaggcttctttacctagggagctgacggccaccgcatcggtcgggccgagtgccgcgccgagtgctaaggctgaggctaaggtgatggacggccagacggcatgcaaagtgaatccgaccgccgccatcgtgacgatagccagtccgatagccagcgataggctcagatccagcgttttcagcaacgccgacttatcgatttcgtgcgcttccagatacagcagcggcgcgataaacagcaccatgaacagttccgggtcgagctttgcatccgggaaaaacggcagatacgtaaccagcacgcccagcacaatctggaccagcggtgtggaaaccttcggtacgaagcgactggcaaacgagctcaccaccaccgccgcaatgatgcataggatgagctcaaataccgccatgttgccgccttctcgtattttttctccaccaaaagtatatgggaaccatgaagaaaacgttaagattgcggccgattatgcacatcatgagacgatatgagaaaaaggcatacactcgttggtatggaatatgacgaggcgatgcgctgtgcactggaactggccggtcaggccgcagccgctggtgacgtaccggttggtgcggtggtgctggatgcggccggccagattgtcgggcgcggatacaacacgcgtgaggctgatggcgacccgcttgcccacgccgaaatcatcgccatgcgtcaggcggcccaagccttgggcgcttggaatctcgccgattgcacgctggccgtcacacttgagccgtgcccgatgtgcgcgggtgcctgcatccagacccatatcggcaccatcgcgttcggtgcctgggatcccaagctcggtgcatgcggttcgatttgggatattccgcgcgatccgcatatcggccatagtcctgaagtgcacggcggcgtgctggaaggcgagtgtcagtccatcctgactgatttcttcgcccagcggcgatagacacggacgcattacttacctcacgcaaccaacacgcggcaccaaggcaacatattccatttcttctaccatcgaaaccagtagtgcaatgcaaatccacacacgtcgaaggagacaatatggccgagaacacctccactttcaccggcgccgccgctgacggcaccgcactcaccgccgtctacctgacccagcccgccgccaatgtggcgatcggtctggtgtttgccggcagcgacctgccgcacatcgtccactggggccgcccgctggccaagcccgacaccctgctggccgcctatgacgccctgaagccgcagcgcgtgtccggcgcgctcgacgacaccgcctggccgtctatcctgcccacccaggccgaaagctggatcggcgagcagcgcgtggtgctgcgccgcgccggcatcgagctcttccccaagttcaccgtgaccaacatcgagaccggcggcgtgctggaagccaccctcgatgccgtgtccggcgaaagctacaccgatgtggccggccatgcccgtgccaccggaccggcccgcgtgcccggcgtcatagtcaccgcgcgcgatgaggagcagggcgtggaagtcgagtggcacctcgaactgctccccggcggcctggcccgtcagaaggccaccgtaaccaacctgttcggtgcagacgccggagccccgctcgagatcggcaagatcgagctcggcttcccgctgcccgaatccgccggcgaaatcctcaccaccaccggtcaccatctacgtgaacgcagcccgcagcgccagccgctgaccgtcggccgtttcgaaaagccgcagctcgccggccgccctgacttcgacgcatccctgctcctgaccgccggcgtgcccggtttcggcttcgagcatggcgacgcctattcggtgcacgtgggctggagcggcaactccgtactgtccgccgaacgtctgccctacac

SEQ ID NO: 2958 - DNA, 23855 bp, Unknown
  R19_24m  MAG No. k141_6987
accgtcgaacaggtcgaacgtgcccgcaaggcatacccgggcgtcaaggtgatcgtgcaccccgagtgctcgatgcaggtggtcgacgccgccgacggcactggctccaccgcgtacatcgtcaaggagatcgccaacgcacccgccggatccgccatcgccgtgggcaccgaaatcaacctggtgaaccgtctggccgctcagtacccggacaagaccgtgttctgcctggacccggtggtctgcccctgctccacgatgtaccgcatccacccggcttacctggcttgggctttggagaacctcgaagccggcaacgtggtcaatcgcatcaccgtggacgaagacaccgcccgcgaagccaaggtggcactggagcgcatgctgcgcgttcacccgtgacatgcttctagctcccctccctgaggggagctgtccgcgtagcggactgaggggagcagatgacgcaaaaacagaggaaagcaacacaatgagcaacactgaaatcgtcgtcgtgggcgcaggcgtcgccggactgtccgcggcactggccgtggccggcaccggacacgacgtgaccttggtaaccaaggccgaactggtggaatcgaacacctatcatgcgcagggcggcatcgccgcggccattttctccgacgacgacccgaagctgcacgccgccgacaccatggccgcgggccatggcctgtgcgacccgaaggccgtggacatcctcacccgtgagggtgcggagcgcgtccgcgagttcgccgcggccggcgtccacttcgaccgcgacgcgcagggacgcatgctgcgcggcctggaagcggctcattcgcgcgcccgcgtggtgcatgccgggggagacgccaccggcaaagtgctcgaactggacgtctccgccatggtgcgcaagaacccgcgcatccacatcatcgagaacgcattcctcaaagacctcatcgtgcgggacggccacatcgccggcgtccgcctgctgatcgacgggcaggacaaggatctggccgccgaccgggtgatcttggccgccggtggagcaggccgtatgtacccatacaccaccaatccgccggtcgccaccgcggacggcctcgccgccgcatggcgtgcgggcgcccaggtcgccgatctggagttctaccagttccatcccaccgccatggccgtgggcgagcacttcctcgtctccgaagccgtgcgcggcgaaggcgcggtgctgctggacgaacacggccaccggtacatgaaggacatcgatccgcgcgccgaactcgcaccgcgcgacgtcgtggcccgcgagaacttccgcgtgatgcaggcgcaaggcggcaagcccgtgatgctcgacgtgtcgccgatgacccgcgagaaccccgacctggccagcttcctggcccaccgattcccgaccatcgacgcctatacgcgttcgcttggcttcgactggagcaaggagccgatcccggtggcgcccgccgcgcactactacatgggaggcattcgcaccgatctgaacgcccggacctccatccccggcctgtacgcggccggcgaatgcgcccgcaccggtgtcatgggctccaaccgccttgcctccaactcgctgctcgaaggacttgtctacggacgccgcgccggtcttgccgccgtcgcggacggtgacgacgcggtctgggcacccgaaccgttcctgaactccgccaccggtgccgtgttcgaccatgcgccgatcgcgctggccgctcctgccgctacggctgctgctgacgataccgccgccgacaaggtgtgggaccgtacccgcatccagaacaccatgtggcatggcgtcggcgtgctgcgcgacgaggccggactgaaaaccgccatcgccgaactcggtcaaggcctcgccgccgcaaacgcccaggctgatataaacgccgatggcgctgcaagtagcgttgaggctttggagaaccgcaacatgctcaccgtaggctatgtggccgccaccgccgcgctcgcccgcaccgagtcgagaggcgcccacgcccgcaccgactacagcgagccagtcgacaactgggcccactccgtcgcctacatcaaggactgacccatgctcacatcacacatcatccgcaccgccgtcgaagcggcgctcgccgaagacgcgccctacggcgacatcacctgcgagaccaccatccccgcggacgaaaccggctcggcccacctcaccgcgcgcgaaaacggcgtgatgagcggcatcgacgtgttcgccgcagccttcgccgcgcagaacccggccgtcaccgtcaccgccgccatcaaggacggtgagcgatttcagcgtggccaggtactcgtcaccgtggaaggtccggtacgcgacctgctcaccgccgagcgcatcgccctcaacttcacccagcgcatgagcggcatcgccaccatgaccgccgccttcgtggacgcggtgaacgccatctacggcgacgactatgacggacccgtcacccggccacgccgctatgagcgcacccgcatcgtcgatacgcgcaaaaccacgcccggcctgcgcccgttcgagaaatacgccgtggtctgtggcggtggccacaaccatcgctacggactgtccgacgcggtcatgatgaaggacaaccatctggcggcgctcgccgcgcgcggcatcgacctggccggcgcgatccgccacgtgcgcgaacaggtgggccacactacgcatatcgaagtggaagtcgaccgccttgaccagattcccgccgtgctcgccggcggagcggacaccatcatgctggacaatttctcgctcgacgacacccgtcgcggcgtggagctcatcgacggcaaggccatcgtggaagccagtggcaacatgagcctggagcgagtgccagccgtggccgccaccggcgtggacgtgatctccgtgggcgcgctcacccactcggtgcgcagcatcgaccttggattggattggaactagtcatggccgatactcccaacgcatccggtgaacccggcgaactgtacctggacgccgccgccaccgaaccagtgagcccggcagtcatcgaggccatgaccccgttcctgactgaggcctacgccaatccggccagtgtgcaccagcccggtaaaaccgcggcccgcgcgctggacgcggcccgcgcatcattcgccgcggcgttgggcgcccggccggatgacgtgatcttcacctcaggcggcaccgaatcggacaatctggccatcaaaggcatcgccatggcgcgcatgcgcaagctgggcctgcggccggtctacggactcgacgaaaccgatggcaaacaactggcaagcagccgcccgcgcattatcatttccgctatcgagcacccggccgtggcccaatcggcggcatggctgcacgaatggttcggtttcgaagtcgtgcgcattcccgtggatgcgcaagcacatctcgatctcgacgcacttgaacgcgagcttgacggcgaggccggcgaacgtaccacgctggtctccaccatgctggccaacaacgaggtcggcaccgtggaacccgtggaggaactggtccgcatcgcccacgcgcacggcgtgcccatccatgtggacgccgtacaggccgccggccagattccgattcgttttcgtgactgggatgtggacgccctgtccgtatccggacacaaattcggcacgcccaaaggactgggtgcactgctgatacgcggccgcacacccatcgaaccggtgctgtccggcggagggcaggaacgcggcctgcgctccggcacacagaacgtggccggcgccgtggcgcttgccatcggactcaacgaatcgaatgcgcgcatgcaggcgcagtgccgtgagttggtcgcgtcccgagacatgctcatcgatgcggttcgccgggtcgtgccccgcgtcgacctgaccggcgaccccgtgcgccgtctgcccggtcacgcctccttcatcttccccggcgtcaccggggaagcgctgctcgtcgacctggacgcgcgtggcatcgctgcctcatccggctcggcctgcgccatcgggcgccacgagattcctgccacgttgctggcgatgggcctcgaaccgtccatcgccaaatcggcattacgcatgaccttccgcaagccgctgacccgcgaacaagtcgaacgcatcagcttggccatcgaagagtcctacaccgacctgacccgacactaaatctgacgccacttaccagaaaggaaacgacgtgagcaccaccactccagcgcaacccgcgcagctcacccgcaacgagcgcctcgaccggctgcccttcaacaaggcgcaccgtaaactcctcgtcgcctccggcatcggctgggcattcgacgccatggacgtcggcctcgtttccttcgtggtcgccgccatcgcagccgacccgcacttcaacctcaccccgaccgaaaagtcgtgggtgctgtccatcggcttcgtcggcatggccatcggcgcggcggtgggcggcttcatcgccgaccgcgtgggccgcaaaaccgtgttcaccgccacgctgatcatcttcggcatcgccaacggcgccatggcgctgtcctggtcgctcggcatgctgctcggcgcccgactgatcatcggactgggcttgggcgcggaactaccggtcgcctccacgctggtctccgagttttcgccgaccaaacagcgcggccgcatgaccgtgctgctggaatcgttctgggccgtcggctggatcatcgccgccataatcggctacttcgtgatcccgaacaccggtgactggggctggcgctgggcgctggccatcggcgcgctgccactgctctacgcgattgtcacccgtgtgcacatcccagaatccgtgcgattcctcgaagccaagggtcgcgaagacgaagccgaaaaggccgtgcgctacttcgaggaagccgggggagtggccccggtaacctctcccaagggcaagccgctgccgaagattaagacgcgcgagctgttcggctccaagtacctggcccgcaccatcgccatctgggccacgtggttcttcgtgaacttctcctactacggcgcgttcacatggatgccgtcgctgctcgccgaccagttcggctccctgaccaagtcattcggctacacgctcgccatctccatcgcccagctgcccggttacttcctggccgcatggctcgtggaggtctggggccgccgcaagacgctgagcatcttcctggccgtctccgccgtggccgccttcgcgttttcgcaggccggatcagcggccctcgtgctcgtgttcggcatgctgctgtccgcctccaacctcggtgcgtggggcgtgttgtacgccgtgaccccggaaatctacccgacccgcctgcgtggcgcggccgccggtgccgccgccgcggtgggccgcatcgccgccatcatcgcgccgctcctcatgccgtggttcctgaccctgtccggcggcaacaaggccgtggccttcatcatcttcgccgccgccttcatcctcgcctgcatagcagccctctgcttgcccgagcgcaaaggcctcaatctcgaagactgattacacttcagccttcgctactaaagtggcccacaccaatgtgtgggccactttttgtcttatagctcccgaatgacacggcaagggttgccgtatgtcactgatcaatcgagggaacgacgggtgagattgcgcggtggttttgtgaccagccacgccaccagcagtccggttaccactacgccgaatgccagcgccgcctgcaatccccagatcggcacggtttccagccaatgaccgtccacaccgatcctgcggttccatgccacatgcagccatcccaacgccacgccggataccacgcccactggcgcgccggccagcagaatcaccgcagcctgcgtcaggccgtaacgtctgaggaatcggggtggcgcgcccacggcgaccatcgtggccatgtcgcgctgggcctgcgtgcgggccagcagcagtgaaacgagcgtggccatcagtgccagcaatgccaacaggccaatgggcaccaatgccatattgtcaccccacggcaggcgattcccgtcagtgttcgtggatgccagcggcagattttcgattgcataagctgaggccttctttacggtaacgggggagttgccaccggcgaagtctagatactcacccagatactgcaattgtttgatgccgagcgcctgtgctgttgccgggctcatcaccagcgggtacgcgccgcgcacgtagatggccttgcgcttctcgatatgtgtggcctgagattcgtttgcaattgccggattcggcgaaatggccacacgcaccatacctcccgcgtcgattgtgccggcatcgccgaccaccacaccgcccgcatcaagcacctgtgccgcctcatccgcgttcgggaagccggacaaacgcatcgcattgccatccataatgagattcacgccgcggaaactcggcagtatattcgaatacgttggctgatgggatcggtctatcggcacacaacgtatcggaacgtttggatacagggccgaagcggcatcctggcccacccatgtggacgtgtccggttgctcttggatcgttgggttatcacaagtgtgaccggccgggagcaatgcagcggcatacatgtagccgtgttcggcgttcaacttgtcggaatcgacttcggtcgtatcattgagctttgaccatcgcttgacatcctcggtgtacaccgggtaatgagcgcgtatcggcgtctctttgccaagccggtgtatcgcatccgacaccacagcacggtcgaactcattgctgacatgcacgtcggccccaatggccatccccgacggtccatacgtcatcgtcatcgtggaatttcgctggtccgccaccatggagccggtgattaccagtgtgtacgaggcgatgcacatggtaatcagcaccgcgcatgccgccggaacgaaccgtcgatgatgctcggctgcatccctgagtgccaggcgtgcgccgatgttcagttgggaacccgctttgccgcaccaccgtgcaaaagtgcgaatcgacaacgcaagccctatgacagccaacaaaatcgtggcaacaagcagagccatatgcgtttcggttccggccggaaccgcgcccggattgtgatcggccagcgtgggcaatggcaatgtcagactgagcgcggcgcatacgatggcggccaagaccagaatcggaccaaccgcaacacggagcagtctcaaaggattacggcgaagcttcgtatccacgccattcgcggattcaccgtagccgatttcctctcttgtcgggcgatccttcaacgcatcgactggatgcatacgcgccacatgccgagccggcgcaatcgtcgcggcaaatccaatgatgattgccgtgacaatacccatcggcagcgagccccacgagaatccgtgcaggatctccagcggcgtggatccacgcaatgcgcctatcgcagggccggccgccaaggtaagcgcgaatcccaatgccgagcccagcacgccaccgatggcgccgataacgagaccttgcgaggaaatgattcgactgaggtcacgtggtgcagcaccggatgcggccgcgagcccaagcacacgacgtgactgatctgccgacaccgtaaacgcgggcgtgaccagaaacagtaccagcaacatacccaccagcatggtgatgaccacagtgaccatgtggttcaacatggtagccgcatcgatctgcatcgggtagagctgcgatgcgggcggatagccgtcagtcagcacatggcgggaaatgacgatggcctgcaacaggttcatgctgcgggtgtgcgcccacgtgaccggctctggaccgaccaccaaataatggccatccacgccgacgccatcagattccaatatggctgacatccagccttccaagccccatgccgcggcttcggattcatcggtcagcccgctgactgtccaagcacgctgagtgtcggccaccgcctcgccgatgcgcccgtccaggctcatccagccatcgaacggcggagcgacgaacgtcaccgtgctaccgagagaagcgccgagattatccgccaatgtgcggctgatgacaatctgcgtattattctgcggcgccgaacccttgaccagcttcggcaacattcgttgcaatgcctcaggtgaagcctcggtcatggtcgcggtggaggccgcgttcagatcaatgtcgttcccgcttttcacgtcgatcccagccttggtctgttcgccgggttgcaacgcggtgccggtgatggcgatgagttcgggcgactgccaatacgggagcagccgatcctgttgcggcagaatcttcgcaagctcggcggccgaggccggctgctgggagggatcgtcctgccacgtgccgccgctttcgggtgactgccggaacggttggccggtgcggggcctggcggtggcggtgatgatcgcctgcgtatcagccgggattgtcgccagcgcacgcgatctggtgggcggtatggtggtggtcataccgatggaggccaccattgcggcgattggcagcattaccagcagcaaggacagtagggtgcgggccttgtgccgtagtgcgtcgcgccagccgagtcgcagcgcggcccgataccggttgcaacgtgcgccaaggcttggcctagcggcatggggaatttgggcagagcgaccgacggtggcattggcaagattattgagggctgcgcgtgccatcatgctcccctttcctcaaggttgagcaaatcatccatattgctggagccggtttcatcgatgatacggccgtccttcaaaaacaccgtgcggtcggcccaggcggcgaagcgaggctcatgagtgaccagcagtacggccgcgccgcgatctgcgcgggtgcgcaacacttcgagaatcgtcatgccggcattggaatccagagctccggtcggctcgtcggccagtagtagacggcgtgggccgaccagtgcgcgggcaatcgccacacgttgcgcctggccgccggacatgtcttcaggtcggcgatcagccatatcggctactcccacttcattgagggattgcatcgcggcctcacgtgccttgcggggattccagccatccaattccaaggggaacgacacgttctcggctgcgctcagggaaggcagcagattgaaatcctgaaacacgtaacctatcgatttgcggcggatggccgcgcgttcggccactgacagtgtggccagatcgcggccttcgaccagcacgtgcccctgcgtgggcacatcgagcccgcccgcaagattgagcaaagtggatttgccggaaccactggggcccatgatggccacgaattcacccgggcgaagcgtgagattggcgtgactgagtgcggtgacacgacgtgcatctttgccgtgaacgcgagtgacgtcgtgtaattccagcgcgcatggggaagattgcgggagagaagaaagaacgggagaagtcatgatgtgctcctatgcactattgaatggtagcggtgagtgcggctgagcttgccgtgagaggtgtcgaaacggggtgctgcgccagttgtgctcgcagctgggtctcatccacggtatcgagccagcgcaattccgcttcagtgatgaaaatgtggtggtcgagtactagacgtgtggcgagttcggtgggcggtgtttgccggcgcagtcgggtgatgtcgtgcagcagttgctgcaaagcgtggcgttggtgttggatgagttcggaaacatcgaggccgggtatttccacggcgacggccagcttcatcaccagttcgtcgcgtccgcgttgttccggggtaataggggagcgccaccatcggtcaagctcttgggcgccggaattggtcaatcgccataatggtgcggccgctgcggtgccgacatcattggatccgctagtagtcggcgcggtctcttcaataagcccgtcgcggttcaaccgctgcagcgtagtggaaacttgccccatattgagcggccaagtcagaccgatggtgcggtcgaagtccttcttaagctgataggcgctggccgggcctcgctccaacagtgctaatagcgcttctctgattgccataccgcatcccctttgcatagacggtttgtcttgggcgaaggttactgagtaactatcgttggatatcaggttactcagtaactacccatgacggtgctgtactcagggatgattcaggggagattcaggggatacacttggcgcccctcagttgcccacggcgacagctcccctcagggagggaagtcgagagtgtggaatacaaaaagtctcgcaagccagatgacatgtgactaattctcagaaagccgggcccgttgtgtgtcaaggtgtgccagtaacatcgtgacggtttgtgtgtaggtacaggttgatatccaagagcaagtactcgagaacgcaagtaccgaacgattacgcaagaaaatcagtattaagagaggtttcgatggcggttcgtggagatatccgtaatgtggcgattgtggctcacgtcgatcacggcaagaccaccctggtcaatgccatgcttcagcagtcgcacgtgttttccgagcgtgaggaagtgccggatcgtgtgatggattccaacgatctggaacgcgagaagggcatcaccatcctcgccaagaacacggccgtggaatacaccggtccgctggccgccaagtacggccacccggagggcatcaccctcaacatcatcgacacccccggccacgccgacttcggcggcgaggtcgagcgcggcatctccatggtcgacggcgtcgtgctgctcgtggacgcctccgaaggcccgctgccgcagacccgcttcgtgctgcgcaaggccctcgaagccaagctgccggtcatcctgtgcgtgaacaaggtcgaccgccccgacgcccgtatcgaagaggtcgtcggcgaaacctccgacctgctgctcggcctggccgacgacgtgcagcacgagggcatcgacctgaaccttgaccagctgctggagatgccggtcatctactgcgccgccaaggccggctacgcctccgtgaaccagcccgccgacggtggcctgccggacaacgacaacctcgagccgctgttcgaggccatcatctccaccatcccggcccccgaatacaaggaaggcgccccgctgcaggctcacgtggccaacatcgactcctccgacttcctcggccgactcggtctggtccgtatctacaacggcacccttgagaagggcaagacctacggcctgtcccgtgtggacggctccctcgagaacttccgcgtctccgaactgctgcgcacgcagggcctcgagcgcaccccggtcgagtccgcgggccccggcgacatcgtggccgtcgccggcgtcaacgacatcatgatcggcgagaccatcgtcgaccccaacgacccgaagccgctgccgctcatccacgtggacgatccggccatctccatgaccttcggcaccaacgactccccgctggccggcaccgagggcaaggaccacaagctcaccgcccgcatgatcaaggaccgtctggaccgcgagctcatcggcaacgtctccatcaaggtgttgcccaccgaccgccccgacgcctgggaggtccagggccgtggcgagctggcgctggccgtgctcgccgagcagatgcgccgcgaaggctacgagctgaccgtcggccgcccgcaggtggtcaccaagaagatcgacggtgtggtcaacgagccgatggaaaataccaccatcgacgtgccggaagagtacatgggtaccgtcacccagctcatggccgaccgtaagggccgtatggacggcatgaccaaccacggctccggttgggtccgcctgcagttcaccgtgccgtcccgtggtctgatcggcttccgcacggctctgctgtccgccactcgcggcaccggcatttcctcctccatctccgctggctatgctccgtgggctggtgccatcaccattcgtcagaacggttccatggtttccgatcgtcagggtgtggccactccgtatgccatgcagcgtctgcaggcccgtggcaacttcttcgtcgaaccgcagtccccggtgtacgagggtcaggtcgtgggcgtgaacaacaagcccgacgagctggatgtgaacatcacgctggccaagcacatgaccaacatgcgttcctccaccgctgacgtgctcgaaaccctgaccccgccgatcaagatgagccttgaggagtccctggacttcgccaacgaggacgagtgcgtggaagtcaccccggagtccatccgcgtgcgcaagatcatcctcggccgtgaggactggtacaagtggcgcgccaagcagcgccgccagaacgccgcccagcagggtaagtgatctggtgcgactgtagccgaccattctctctggctcccctctctgaggggagccaagtttattcctcgccaagtcatatccccacctatactgaaacgcatgactgtgaagagcactactgaactgcgtccgtggtcgtatcgccagaacgcgctggtcaaatcgttgatcacgattgcggcgggcgtggcttccgcctttgtgggcacgttcgcccaccgtatgggtgcagaactgagtattccgtatggtctggtgctggcatttctgctgatcggcctatcgacatggtgcgcccgttcgcgcatgggcgcggtcggactggccctgcacctcatcgcctcctcgctgaccgcatggggcatggcactgaccaccacatccggcaaggcggtcatcgtcgccggattccaaggcgacatgccgttcttctcccagcatgccggctacatctggctgtacggcctgatactggtccaagtcgtcctgctcattcttcccgcccgctggttcgttattcccactcattctgaatcgcgcgcgtaactatatatggcggcacatttccgcgaatgcgtcgcgtatcggcgggcgtaggggattacggccgctaccatagaaccttatggcacacatgaaactgttttacttgggcccggaaggcaccttcacccatcaggcggcaatgacggccgccgaccagttcgccacactcggcgacttcgacctcaccgccctgcccgacgtgcccgcgatcatgcaggccgtacagtcgcgccaaggctggggcgtcatcgcatgggaaaacaacgtcgaaggctatgtggtcccgaatctcgacgcgctgatcgacgcccccgacgcggccggcttcgcccggatcagtgtggacgtggccttcaacgccttcaccgtgcgcggccacagcatctgcgactgcaccggcaaccccgtcagcgcccacccgcacggcctggcccaatgcacccggttcatcaccgaacaccatttgcagcccgaacccgcatcctccaacgccgccgcctgccgcgacctgaagcccggccgcgtggcgctcggccccagcatctgcggcgaactctacgatctcgacaccctcgccgaacatgtgcaggatttcgatggcgcgcacaccgaattccttgtcatcgccccgcgtgatgtggtccaggaattcaacgcccgcgcccaccgcaatgacgccggcgacttcgaaaccatcatcaccttcatcccgctggtcaccggccccggcgtgctcgccgacctgctggacgtcctgcgtgatgcggggctgaacatgaccagcttcatctcgcgcccgatcaaaggccacgacggaacctacagcttcatcgccacccttgacgccgccccctgggagccaagattccgcaccgcactggaagagatcgccggacacggcgactgggcaaaaaccctggccgtctacccacgccgcgaacgcccgaacccgccggtcgacgcctggatgctgcccgagggcggcgtccacatcaccaatcgcgcgtcggaaggctggcagtacgccgagggagcaaggaaggaactgctgtggtagacacagtcggaatcgtcggactcggattgattggcggctcgctcgcacgccgcctgaccgagcgcggcgtacgcgtcatcgcgtggaaccatcgctcgcacccctacgcccaggccgaagccgatggcattttctgcaagagcacgctctccgaactcatggatgccgagccggatgtggtcgtgctgtgcaatccgctcaaggcgatgccctcaatcctcgccgccctagccccgcttatgggcgaccatccgaacaccacgctcaccgacgtgggctcagtcaagggcatggtccgcgatcaggtcaaggctgccgcgctggggaagtgctacgtcggcgcccatccgatggccggcaacgaactgtccggctggcaggccgccgacccgcatctgtacgacggtgccctatgggccatcaccgtggacgagtccacggactaccgccgcttcctcgacgtcgccacgatgatcaccaaggacgtcggcaaccgcgtcatcgtcgtggacgacgagacgcatgacaaggccgcggcgatgatctcccacatgccgcatgtggtgtccaccgcgctgatcaacgaactggtcgccaacccggaccgcaacatcgccgccgcgctggctgccggctgctggagggacatgacccgcgtgtccctgaccgacccggaccgcacgcgcgcgatggtcgaggaagactcgctgaacgtcgaagtgctgctgcgccgcatggcggcacgtctgaccgatatggccgaccaactgcacgctggtgccgacggcgagcaggatgtgatgggattcttcgccgaaggcgaccccttccgccggtacaaggccgccgtgacgcgagccggcatcaccgctgcacaagctggtacggccaccgcgcagcaagccggcacaactgccgccggattcccggaacgcgagctcgccgtccccgaagccggctggcagcagaccttgctgttctccgcacgccggggagaagccatcaccggtttcatccatccgcgtcaggccatcgtccaactgcgccccgccatgtaactgcgccccgccatgcagcccgtgtgcaggttcccctcgccgcccgtcacgaagaaggctgcgcgagggggatgaagttcccgcttgttttcgtgagaagaccgtgtggctccgctgttcgaaagacccaaaggagtaaggtagtctgtaccgtttttcaggaaacgcatagaagttgatgcggcggatggctaaggggatgatgacgtatgacgttaccaaggcagattccggccggtgcccgcgtggtggtgcgcatcaccgacggcattgacccggtcgaccaccgtatgaagttccgcgactatgtggggcatgtggtttcctgggatggatacacgttggagatggtgcgtgacgccgccgccaatggttcgcgcccggcccagaacgtgaccatccatcaggaacagattgccacattgaaacccgtgccggagcggcgtaacacgccaccccggccgtaacccaaggccataaagaattcggaggagaacgagagtgtcatctacgcagttcgacggcgatatcgactccttcgtctcctatctgaagtccaaccgcggcctgtcagcgaatacgctcaaagcgtatcgcgcggatctcacggcatgcctgcatctgttcgagctgcgcggcgtgaccgatctgaacgagatcacgctggatgatctgcgcagctggatggcggtggaatcgcgcgatcacgcccgcagcagcatggcccgcaaaaccgtggccgtgcgcgggttcttcgcgtgggcctatgagcatgggctgaccaccaccgacccggccgccacactgatgactccctcgattcccagcacgctgcccgcggtgctcaccgaatcccaggccgagcaattattggatgtcgctgaacatgccgttgcaacaaaccagtacaaggacgatgggggagcggcagccgcgtccggcagcggcagcggcaagacagctgataagtcggccgataccgtacaccgcagtgaggcacccgcccgtgcagacaagcgcgacaacgcccgagtcaccgccgaatcgcagcgcaacgccgcgattctcgaactgctgtatgccaccggcatccgtgtcgccgaactggtgtcgatggatatcgccgacatcgacttctccaatcgcaccatcaaagtcaccggcaaaggcaacaagcaacgcgtggtgccgttcggactacccgcccagcgtgcgctggagacttggctggaacaggggcggccggtactggcccgtacggcaacggatgcagtcaagtcccgtgctgccaacgccctgttcctcggcgcacgaggcggccgtatcgaccaacgcatagcccgtgacatcgtgcacagagcggcccgagaggccggcgtgccggacatcagcccccatgcgttgcgtcattccgccgccacgcacatactggacggcggtgccgatttgagggaggtgcaggagatgctcgggcattcctccttgaaaactacacaacgctatacgcacgtctccatcgagcagctcaagaaccgttacggacaggcctttccgcgggcatgaccactatgtggacattggttaacaaactcagcaaagactgaacctagccggcaagaacccctgaattttacatgggtgtaacaaaaaatacactgcttgtctcccaagtgcgcaaaaatgacaggtaatcagcaacggggttggattgttcgagacatcgtgagatgcaagtctcacggtgacggggaatccagccccgtttgcatgaggcggggctgagacgtcctgcaacctaatgaataggagaaatcatatgaagaagaaagctcttgctttcgctgccatggcctgctccgtggccatgctgctgagcgcctgcggcggctctaacagcaacgctgcctccggtaacaccgctggctccaacatcatcactgcgtacaactccgaaccgcagaacccgctgatcccgggcagcaccaacgaaaccggcggcggcaagccggtcgacctgctgttctcccgtctggtctccttcgacaaggacggcaaggcttccaacgaagtggccgagtccatcaccccgaacgatgacgccacccagtacaccatcaagatcaagtctggctggaagttcaccgacggcactccggtgaccgctgagtccttcaccaaggcctggtcctacgtggccaacgccaagaacgcccagaagtgctcctccttcttctccaccatcgccggctatgacgatctgcagaaggatggcctcaagggtgacgagcagctctccggcctcaaggtcgtggacgacaccaccttcaccgtcgacctgaaccagtccgactccgtgttcccgattaaggtcggctactcggccttcgccccgctgccggaatccttctacaaggatccgaaggccttcggcgagaagcctgtctccaatggcccgtacaagctggaccactgggatcacaacaaggaaatcgccctcgtcaagaaccctgactataagggtaacgagcagcccaagaacgacggcgtgaccttcaaggtctacaccgacgactccgccgcctaccgtgacattcaggccggcaacctcgacgtgatggaatccgtcccggccgccttcaccaagaccttcaagaccgacaagaaggtccaggcttactccgaggccggctccgtcatccagaccttcaccatcccgtcctcccttgaccacttcaagaacgacgaggaaggccagctgcgtcgtcaggccatctccatggccatcaaccgtgaccagctcatcgacaaggtgctcaacggcaacgccaccgccgccaccgagttcacctccccgaagaccccgggctactccgactccctcaagggtgccgacaacctgaagttcaacgcctccaaggccaaggaactgtgggccaaggctgacgccatctccaagtacgacggccagctcaccttctcctacaacgccgatggtggtgccaagccgatttacgacgccgtcgtgaaccagctcaagaacaacttgggcatcgacgcggccaccaacccgatcccgaccttccaggaattccgtgacgcgatcaccaaccgtcagatgaagggcgccttccgtaccggctggcagcctgactacccgtccgccgagaactacctgtggcagctgtactccaccgctgctgctgacggcaacggctccaacgatggtgactacaagaacccggccttcgatgacctgtgcaagcaggccgctgccgtttccagcaccgatgacgccaacaagctgtaccagcaggctgaggaaatcctcctcaacgaccttccggccatcccgctgtactactccaacgcctccggtgtggcttccctcaacgtgaagtccggctacgccttcgattggcagaacctcccgacctacaccgagatgtccaagaagtgagtctgactcactgaacggataccgttaggtagttcggaaataaagggcgaggatcgcaagatccccgcccttttttgttgtgtgaggggtgcttgctcacgccatcgggaaccaagttaaagtatccactatccgaccgcaaccatggacatatccaccagcattgcccaatctcaaaccttgcgttaacgcaaatttacatatcacagtccgggcatgcggtaaactgtcggagtatttatcgaccggcgggggcgtactataccctttctggccggtctaggaaataaggagcaaccgtatgggtaagtatcttctgcgacgcattctgcagatgattcccgtggttctcggtacgactcttctggtatatgcccttgtattcgccctgccgggcgaccccgtcaaggccatgttcggagacaagcctgtcaatgaggccgtcgcagcccagatccgcgcagaataccatctcgaccagccgttcatcgttcagtactttatctacctgaagaatgcactgaccctgaacttcggcgataccttcgccggccagcccgttctcgacgaaatcacccgcgccttcccggtcaccatcaggctcggcttgatggcgttcgtgttcgaggcgattttcggtgtggtcttcggcattatctcgggcctcaagaagggcaagtggtacgacaccgttatcctgatcgtctctctgctgcttatttccgtgccgaccttcgtcaccggcttcgtcatgcaatatgtctttggtattcagtgggcgatattgccggtgacggcaggcgccgaccccggcttccttgatctgctcatgccggccatggtgctcggttcggtgtcgatggcctatatcatccgactgacccgctccgaaatctcctccaacatcgccgaggattacgtgcgcaccgcacgtgccaaaggtatgtcgaacggtcaggtcatgctgcgccacgtgttacgtaactccctgattccggtcgtcacttacctcggccaggacatcggcgccctgatgggtggtgccatgatcaccgagcagatcttcaacatccacggcatcggcttcctcacctaccagtccattctgaagggcgaggcaaacctggtggtgtccatcgtcacgttgctcatgctgattttcgtagtgtgcaacctcgttgtcgacatgctgtacgcggccctcgatccgcgtatccgttacgcgtgatagggaggagtgagtcacatggcaaacgaaaccactgaaaacgagctcaaccagaccggcgagccaggaaccgaatacttcatggaaaccctgcccggtcaggaccgttacgtagctcctctcgacgagaccccgttgcaggacgtcgattccgtcgacgaatccgcaccggccaccagcatgtgggccgacgcatggcgaaccctgcgccgcaacccgctgttcatcatctccggcttgctgatcctgttcatcatcgtggtggccatcgcccccggtctgttcaccaagcaggatccgaacgcctgcgatctgggcaactccttgagccccgcctccgccggacaccccttcggcttcgacctgcagggctgcgacgtgtacacccgcgtgatctacggcacgcgcacctcgctgtccgtcggcgtgctctccacgctgctggtcgtgatcgtcggcaccctgatcggcgccgtcgccggcttcttcggcggttgggtcgacgcggtgctgagccgtatcaccgatatcttcttcgcgctgcctatgctgcttggcgccatcgtggtgcttcagatgttcaagacctccaagtccatctggaagatcgtgctggtgctgacgctcttcggctgggtcggcgtatgccgtatcgcccgaagcgccgtgctggaatcgaagaacctcgaattcaacaccgcctccacggccctcggctccacgccggccagaaacctgttccgccacatcctgccgaactccctggccccgatcatcgtcatcgccaccacctcgctggcctcctacatcgtggcggaagcgacgctgagcttcctcggcgtcggcctgccgaccaccacggtgagctggggcggcgacatctccagcgcgcagaccaatctgcagaccgatccgatggtgctgttctacccgtccgccgcactggccatcaccgtgcttgcgttcatcatgatgggcgacgccgtcaaggacgccctcgacccgaagagccgtacggcctgagcgaggggagtggagaaacattatgactgacaacaccaacgccaagatgctggctatgcagaaagagcatggtccgctgctcgaggtcaaggatctggccatcgacttcaccaccgacaccggcaagccggtgcacgcggtgcgcgacgccaacttcaccgtctatcctggccagtgggtggccatcgtgggtgaatccggatccggcaaatccacctccgccatggctgtgctgggtctgctgcccggcaccggtcacgtggtcaacggctccatcaagctcgacggcgaggaaatcgccggtgccaagcagagcgagttcgacaagctgcgcggcaccaagatgggtctcgtgcctcaggacccgatgagcaacctcaacccggtgtggcgcatcggctcccaggtcaaggaggcgctgaaggccaacaacatggacgtggcccacgagaagcgctccgccctcgcccaggccctggccggcgacgaggtcgaagtcaagggcaccgacgacgagaccttcctcggcccaaaggaactgcccgagctcatgaccgaggccaagaaggccctgaccgaagccggcgtgtccggcgaggccttcgacaaggccgtcgcccgcttcaccaacgaatgggttccgggctccgaaacccgttggcgcgtggccgacgacctcatcaaggccggtgtggccgatgatcaggcctggtacctcgccaagaagtacgtcatcggctccacaatggatgaccgcatcgcgggtctgctgtccgaggccggtctgcccgacgccgctacccgtgcccgtcagttcccacacgagttctccggtggtatgcgccagcgtgcgctcatcgccatcggtctggcctgccgccctgacctgctgatcgccgacgagccgacctccgccctcgacgtgaccgtgcagaagaagatcctcgaccatctgcacatgctcactgactcgctgggcaccgccgtgctgttcatcacccacgatctgggtcttgccgccgagcgcgcccagcacattgtcgtgatgtacaagggtcaggtcgtcgaatccggtccgtccctcgaggtgctgcagcacccgcagcacccgtacaccaagcgactcgtggccgccgccccgtcgctggcctcccagcgcatcatctccgccaaggagcgcggtgagaacgcggacgccctgctcgatcaccacatcgccggcgaaagcacgcttgagaaaagcgagcacatcatcaccgtcgaccacctgaccaaggaattcaagctgccccgcaagaaggagatgttcaaggccgtcgacgacgtgtccttctccgtcaagcgtggcaccaccctggccatcgtgggcgaatccggttccggcaagtccaccgtggcgaacatggtgcttcacctgctgaatcccacttccggcaaggtgttctacgaaggccgcgacacctccacgttcaaggccaaggatctgctcggtttccgccgccacgtgcagccggtgttccagaacccgtacggttcgctcgacccgatgtactccatcttccgttccattgaggagccgctgcgcatccacaagattggcgataagaagtcgcgtgccaatcgtgtcaaggaactgctggacatggtcgagatgccggcttccgtgatgggtcgttacccgaacgagctttccggcggccagcgtcagcgcatcgccatcgcacgagccatggctctggatccggacgtcatcgtgtgcgatgaggccgtctccgccttggacgtgctggtgcaggatcaggtgctgcgtctgctcaacgacctgcaggccgagaagggcctgagctatctgttcatcacccacgatctggccgtggttcgccagatcgccgacgaggttgtggtgatgcagcacggcaagctcgtggagcacgccaccaccgatgaggtcttcgaccacccgcagaagcagtacacccgagacctgctcgacgccatccccggcggcaagctccaactcggtctggactgataatctgcgtttgagcgcattgtattgggttctttccatccgtggaaagaacccaatattcgtatgcgcgggtttgcatgatggttcgcgtgggacgaaaacgcaaaaatcggtgttttcccgatgttgtcccacaatttgtgggacaacatcaacatcaatcgatagacatgagtgttgtcccacagcagatttctcacgaagcccggaattacgccattcttagtgtggtcgataattactcatgctgtggggcgtgggacgacccgcgaaaatcgtcgattttcggatgttgtcccacggaatacgtcatacctcgtatgtgatcgtgagtggggcgtgatcggaccagcgtttgtcatacgtgggagccttgtcgatgacgaatccgcgtgcggtctccgccagctcgggcgtggcgaactggtagtcgattctccagccgacattgttgtcgaaggcgcgccctcgttggctccaccatgtgtacggcccctgaatgtcaccggccaacgaacgcatcacatccacgaactcgtattcgtccagccatttgtccacgtaggcacgttcttcgggcagaaatccggcgtgcttctcattggccttggcgttcttgatatcgagcggcgtgtgtgcgatgttgaaatcgccgcataatacagcctgcttgccgccatgtgcggcttcatcacgaagcgcgcccatgcgggccagcatagtgtccagaaaacgatacttctgttccattttggtcggatcatcggtgttgccggcatgtatgtacacggatgccacggtgatcgtatagccctcaggcgttttgacatcggtttcgatccaacgccccgaatccacatcctcgctcagacctggc

SEQ ID NO: 2959 - DNA, 16574 bp, Unknown
  R19_24m  MAG No. k141_7217
gcgaacgaggtcagcggcaggcatccgaacaggccggatacggtggagatcaggccgtcgccggcgatggcgcccgcggtctcgcgttcggtgggcgtacggttcaggcccaccttggtcagcgcggcggtgtcacccagcacctcgaccgaggagacgacgtagagcaggccgatggagattatcgaaccccagtcgaactcaggcttgaacggcatgaactgcggcacggacacaatagcgaggttctggaaaccggagaaatcgaccttgcccatgcagatggccgccacatagccgaccaccaggccgaacagcacggacagctgcttggccgtgcccttcatcaacagctggaacgccaggcaggcgaccaaagatataagcccgagcgtcaggttctgccagcttccgaagtccttggctccgctgccgccgccgaagctcgtggcacccacgttaagcagcgagaagccgatcgacgtgaccacgatggcggagacgatgggcggcacgaaccgacgccaatacttggccgtcaaacccagcacgagttccagcaggccaccgaccattaccgcgccggccactgcgccatagcccttgtctgcgcagatcgccacggcggccgccacgtaggtgaaggagatgccggtgaccatcggcagacgcgagccgatgagccacgcgccgtacagttgcaggcaggtgcccaggcccgccaccagaaggccggcctggatgatggtggccgattgggccggggtcattttcgcggccgaggcgacgatgaagatcggggcgaggttcgccacgaacatggccatcacatgctgcaggccgaacggaatgcccttccagaaggatactggcgcgttcagcgaagacagcgcctcaaaggatacggaattcttggttttcttctctgacatgattcttttcttctctctgttgctcccgctggcgggagcagtcaatgtgctcagtgcctaaatgtgatttcgccggtctcgggattcatggactcgacgatggccagcgaatccacatcgtagccttcggcacgcagcgcgtcaccgccgccctggaagcccttctccacggcgatgccaatgccctcgaccgtgacaccggccgcctcgcacaggtcaatcagaccgcgcaacgccttgccgttggccagaaaatcgtcaataagcagcacatggtcgccggcgttcagatacttcttggccacgatcaccgggaactccttctgcttggtgaaggaatagaccgtggtggtgtactggtcgccgtcaaggttgatggactgcgccttcttggcgaacaccaccggcacattgccgaaatgctgggccgccacacacgcaatgccgatgccggacgcctcgatggtcagaatcttggtgatgtgcttgccggcgaaatgagcggcccatgccgaacccatgcggtcgaacagacgcacgtcgcactggtggttcagaaacgcgtccaccttgagcacatcacccgccttcaccgttccctcgctctggattcgctcctcaagttcctgcattagacctcccattgctgtatgtcagtgaatgatatggatacttgtaagtgtacgttgtcctgcgctgacccgtgcatgtggtaaacatgaatgtcgcgattcaaagggaggcaacagtgtacgacgagccggaagtcatcgcacgcagcgcgcaggaactcgtaggcgatctgaacccgcagcaggcggaagccgtgcaataccgcggtcaggcgctactgatcggcgccggtgccggctccggcaaaacccgtgtgctgacccgccgcatcgcctggatcttgagccagttcggcgcatggccgagccagattctggccatcaccttcaccaacaaggccgccgccgaaatgcgcgaacgactcggctcgctgatcggcccggtggcccagcgcatgtgggtctccaccttccattccgcctgcgtgcgcattctgaggcgcgacggcaagtccatcgggctcaagtccggcttctccatttatgattccgccgactccgagcgactcgtcaaaatcatcgccaccgaattcaacctcgacatcaagcgctacactccacgctcgatcctcggccatatctccgacctcaagaacaatctgaccggttggaaggaaaacctcgccgttcacgcgcccgacttcacgcctggccagcgcggctaccagttcggcacggtgggcgaccttgaagccatctatgcggtgatctacgccgaatacgagcatcgcttggccctggccaacgccgtcgacttcgacgatctgatcggccgcacggtcgagttgctgcgcaccgacccggccgtcgccgagtactaccatcaccgcttccgttacattctcgtcgacgagtatcaggacaccaaccacgcccagtacgtgcttgtgcgcgagctggccggcgtggacacgggggagaaggccatcccgggcgcgccgaacgccggcaagtccggccccgcctggatcaccgtggtgggcgattccgaccagtccatctacgcgttccgtggcgccgacatccgcaacatccaggacttcgagcaggacttcccgaacgccaagaccatcatgctcgaacagaactatcgttcgacgcagaccattctggatgcggccaacgcggtgatcagcaacaacgagggccgcaagcccaagaaactgtggaccgcgctcggcaagggcgagccgatcgtcggctacgcggcggacaacgcccagcaggaggcccagtgggtggccaccgaaatcgcgcgcctgcacgccgaagagggcatctcctactccgacatggcgatcatgtaccgcgccaacgcccaatcccgctcgctcgaagaggcgctgatcaacacgaatcagccgtatcagctcgtcggcggcaccaagttctacgaacgtcgcgaaatcaaggatgcgctggcctatttgcaggcgctcgtcaatccggacgacgatgtgaatctacgtcgtattctcaacgtgcccaagcgcgggcttggcgaccgcgccgaaggcgtgctgctcgcctacgcgcgcgagcatggcaccagcttcttctacgcactcatgcacttggatgagatcgaggtgccgacccgcaccgccacctcgctacgagcattccgcgatctgatgggcgcgctctcgcagttcacgcacgcgcacgactccaagcccagcgagatcgtggccgaagtattggagaagtcgggcttgagggccgaacttgagaaatccgtggacccgcaggacgcctcccgtctggagaacctctcccagctgcagtccaccgcagccgaattcgaacagaacacgcctgacgccacgttgtccgcattcctggagaccactgcgctcgtggccgactccgaccagctgcccggtgaggcggaggactccggcaaggtgacgctcatgaccttgcacaccgccaagggcctcgaatacccggtggtgttcctgaccggcatggaacagggcaccttcccgcattcgcgttcgatggaagacaccactgaactgcaggaggaacgccgactcgcctatgtgggcatcacacgcgccaagcagcggctgtatgtcacgcgcgccgccgtccgatcccagtggggtcaggccgccgacatgatgcccagccaattcctcgacgagattccggatccgctgattgattggaaacgccgtgaagccggcgtggagcgtatgcgcgccaactgggagaccgatggattcgccgacgatttgggcggctgggatgatgacgatttcggcggtgccacgtttggtgggtcgtcgacgttcggctcgcgtggttcgtccggttcgggttcgtcctatgggtcgcggtcgcggtatgggtcgtcgtatggctcgggttccggctcctcgtcgtatggttcccgttcaggttcttcgtacggttcccgttcatcatcatatgattcccgctccggctcgtcctcctacgggtctcgctcccgttcggggtcgtcttacgggtcgcgttcccgttccggttcttcatccggttcatatggcggcacccgtggcggcaaggtcaccacgcgccgcaccacaccgaaatccggttcgaccggctctgccgtgcccagctcgaagctcaccaaggacaatggcctgaatatcgccgacttcgccgtgggcgacatgatcagccacgaccagtacggtctcggcaaggtcaccgacgcgcaagacaagggccgcaattcggtaatcaccgtggacttcggctccgccggcgtcaaacgcctcatgctccgcgtagcacctattgagaagttgtagatagattggcccctctgacgaggggctgagttatataccaaataaattcacaaaaaacaagacttgtgttcttcatcactatctgggcataatgcggaggttgcgcctacgagccctgggaacaggggagaggaaaaagtagttatgaagaacaagctgtttgcatccgtgcccaatattctgttcggcgcgctgatcaccatcgcgccccagacctttgcgcacgcctgcaccggccatgacatgccgggtgcctgccactactcgcagcaggcggccaccggcatcggcgtcgtcatcctcgtgttgggcgtcgtggctttgttcgtcgccccgcagattcgcatcggcctcaatatcgccgccgcagccaacgccctgctactactcgccgtacccaccttcctgatcggcatctgcaagggcgcgatgatgcactgccgcatggttatgctgcccacgctcatcgtgctcggcgtgctcaccatcgtgttcgcggccatcgccatctggctcgactctcgcgccgccaagcgcaactgatcgagcagacggccggagcccagccattccgaacgctggactccggtctcgcttattgcaaccgcactataagcaacataaggactcatcgtgccatcccatatcgcattgcgcggccttccgattgaaaacctcaaacgcaagccgttccgcaccggcgcactgctcgccgtcgtcaccatcctcgcgctgacgttcttcggcggcaccatgctgaccatgaacctcaacaccggcatgaccagtatggagaagcgcctgggcgccgaccttatggtcgtgccgcaaaacaccgcgcagaaggctgaagcgctgctcaccagcggcaatcccagcactttctatttcaccaaagacatcgccgacgaggtcatgcaggccgacggcatcgcacaggccaccgaacagacctatatatcatcgctggccgccgcctgctgtgccgaaaagctgcagatcatcggttacgacccggacactgacttcgtcatcgaaccatgggtcgcatcccagttcgaaggcccccttgaagacggtcagatgattgccggcgcaaacgtcaacgtgtccaccgacggcaccatcgaactctacggccataagtggccggtcatcgcccagctcgccaacaccggcaccagcctcgacaattcggtgttcatcaaccaaaacaccgtgcctgatatggtcgccgcctcggccaaggtctccaagcaggtcatgcccgccgaatatgcaggcgaagccgtctccaccgtgatgattaagacgcagcgggggtacgaagcgcagaccgtggctgagaacatcaagcgtcttgactcccgattcgccgatttgggatacgtataccccggcggcatcaccgccaacaccagaacttcgctgaccgcgcttgtcacctacctcaagattttcgtggcggtgatctgggtaatgggcgtgattgtgctgctcgccgtattcgcctcgtcggtgaacgaacgcaaacgcgaattcgcgtccctgcgcatcatgggcgccacgcgcggcatgttgaatgccatcattctgaaggaatccgccatcatcggtctgatcggtggcgtaatcggcgtcggcgcggccagcctggtgattttcccattcagttcgctgatcggcaaacaacttcaattgccgtatctgcaagccagcccggttgcggtgatcggattcattgccgtgaccattgtgtgctctacggtcatcggcatcatcggttcgctggccaccatgtggcgtctcggccggcccgaagcctacctgaccctgcgagagggggagtgatatgactgagacaactacgccgactcggctgaccacggttgagccgaccaagctccagccgaccacgccagctcagccgaacgcgccgactgtgccggattcgccgcacgtaaccgagacgccctccccggaccatctgctgaccttgacggacctgacccgccagttcgtccgccgcggcacgccgttcgacgccgtcagccacgtgaacctcaccgtcgatgccggcgaattcatcgccatcgtcggccggtcgggcaacggcaaaagcacgctgatcaacatggtcgccgggctgattcgcccgacctcgggaaccgtgagcgtggctggacgcaatgtggccgacttgggcgataaagcactgtccgtgctgaggaatcgcaccatcggattcgtgacccaaagccagaccctgctcggcaacctgaccgtgctcgacaacgtgattctgcccgcaacgatgtttccggagccgctgccgtttgcccaaaacgcagaagcaacggatgccgttgctcaggtggacgctgttgcgtcgaccgatgccgtggcacaagccgctgccaccaatgatgaagcagccgccgacctgttcatgccggatgtcattgcgccaatcacagaccgggaaaacacgccgtcaaacacggctgcgagccgtccggacctgttcgccacccgagctcgcatgctgctcacccagcttggtgtcgccgatctggcagacagctacccgcgcgagctgtccggcggtgaaatgcggcgcgtctccatcgcccgcgcgctgatgaaccagccgagcctgctcatcgccgacgagccgaccggcgacctcgaccaggagagcaccgacatcgtaatgcgtctgctcagagaccaagccaacaacggcacggcgattctcatggtcacccatgatcccgatgcactcgaatacgcagaccgggtgtatcgcatggacgccggagtgctgtccatagcctcggtgtaatatggtctgctggtgtctgccaacaggtagataccgtctggagtcatagcccatcagcgggtcggcggtaggtgatcgcaagaaaaccaacccgttcgtgttcgttcacgacgaagcgctggggaggcccggctcagcgcttgccaggcatatgcaaggcaagcgttccgttcagataacgacagaaggattaatccaatgacgaacgttcagcgttctcgccgtcaggtgcgtctgtctcgcgccctcggcatcgcactgacccccaaggctcagcgcatcttcgaaaagcgtccgtacgctcctggcgagcacggccgcgaccgccgccgcaccgagtccgattacgcggtgcgtatgcgcgaaaagcagcgtctgcgcgctcagtacggcatctccgagaagcagcttcgcgccgcttacgagaaggccacccgtactgccggccagaccggtaacgccatgctgaccgacctcgagacccgtctcgacaacctggtgctgcgtgccggcttcgcccgcaccaccgcccaggcccgtcagttcgtggtgcaccgtcacatcctcgttgacggcaacatcgtggaccgcccgtcctaccgcgtcaagcccggccagaccattcaggtgaaggccaagagccagaccatggttccgttccagatcgccgccgaaggcgtgcaccgtgacgtgctgcctgcggtccccggctacctcgacgtgaacctgccgtccctgaaggccactgtgacccgtaagccggaggtcgaagagatcccggtgcaggtcaacatccagtacgtggtcgaattctacgcccgctgatccgggccctctggtcaacaaatccaggacataccgctcgaaccccgcgcttctttcgagaagccgcggggttcctgcgttatagggcgattactggccgcacaccgcctgacgaatcatcgtcgcgtacgcataggcaccggtcatattcggatgaatgccgtcatcgttgaggtattcgctatgaccttcgctatacccatgccaatcgatgatgcccacgttcttgttcttcttggcggcctcacgcagcatcgtattgttgttgttctcctgccacgggtatggcatacggatggtgatgaagtatgtcggcttgccgccggtcaggtcaatgagctgttgcacttcctgctcattcgaaatcacgccgttcgtgccgaggccaaacaccaccacactgccactgtggccggcagcggtgtcctgctgatacacatccaccgcctgcggcatctgacggtttggcaggccatcgataaaagcgttcgggaatgcggcctggatggcgtccgaagtacccgacgtcactgaatcgccgaccatcatcatatccgcgttgcagctttccgttgccggatcataggcgtacttcgaaatgtcaagattgtttggcaccttttccgcaatcggtttgatggtgggcggctgagaatccgaaccgttcttattcgcgtcagcggtattggtttcgccgttcgcggcattcgtggcagaagactcgggctcgggtttcgccggtttcttgaccggcttggcgggtgccgcgagttcggggcgcagctgaatggctcgcgcttgagcgatgccattccaatccaccggtgcccacgtcagcaccacaacggtcaccaatccgataaccgacatgacccacgcgcccgggcgcagctggtagccggctttcggcagcggcttggcatgttggctgcgaggcatctgcaccgatttacgggccgcctcgaccagctggtagaaggcttccgacgccgccaacaccacgatggcctcaagaacccaaccccaccacggcaacgcctgcgttcgtgtcgccgggttcatgaactgcagcagcggataatgcatgacgtacagcgagaacgatcgcgacccgatatagcgtaggggagcgcaacccagcacgcgcgaccagattgagtcattgttcacggcacaggccaaggcgcacaacgatatgaacgcggtaatcaggtacccgccttggtacatgtacgacagatacccgttggcgaaccagaatccggccagcagtgccgccaaagccgcggtgccaagaacattgcagacgatagtgagacgggcgcccgtcttgtcgccggcctgacgtccgatctgcactgtttgcgaagccgctccagcttccacaacttccgtacctcgcgaggaaggcgcaatccagatagccaacagcgcgccggcggccagctcggcgagacgagtatcggtaccgtaatacacgcgggaggtattggccgggtcaaacagcagcaccatggcggcggtggaagcagccatgatgacaagaatcgccatggagcgcacccatttggacttggtgattttgccgagcaccaccatcagcaacggccaaatcagatagaactgcatcgtcacgcccaagaaccacagatgggtcagaggagaaggcaatccggccgcctcgaaatacggcaccttgcggaagatgtacacccaattgctggcgaacaaggcgctcggcagcgaatcggaaaccactttctgcaacaggctgggagcgaacatccaagtgagccaaggcaccacggcaatggtcgccagcatcaccggccataaacgagtaatgcggcggatcagatatcggccatatccaaaggacccggtgcggtccaccatgttcagtactgaacgtgtggcaagaaaaccggtgataacgaaaaacatcgtcacgccaatgaatccgccctgcaatagcgacgggcgggtgtggaatgctatgactccaagaatcgccagagcgcgcagtccatcgatacccctgaaatgggcaggctcagacgattgagatggtgcaggtttcgaggttatgctcatagtaccctaagtgtactctcaggaatcgtcaggtatactacccggattacgcatatctcaggtagtgacctatgccgttatgacttatgacttccggcagcccgcaccgaaaccgccggaatggtgacataatcggaaccatgattcttcatctgcatttggtccgtcacggacagacctatttcaaccgatacaaccgtctgcagggatggtcgaattcgccgctgaccgagtcgggcgtcgctgatgccgtcaaggccggtgagcgactgaaaggattgacgttcaccgccgcctactgttcggacaccacgcgtgcccggcagacggccgagaaaattctcgacatcaacgaagccgcgggtaacccgcgccccgcactcgtgacggacatgcacttccgcgagcagttctacggctactacgagggacttgacatggccatggcctggtacgccgcgggagcgcctcacggcgccaaaacctacaaccaaatcgtcgagaagttcgggttgggggcctcgcgtgattttctcaaggaagccgatcccttccacgatgcggaatccgatgaggaatattggacgcgcgtcgaaggcgcgttccgtcttatcgccgacaacccgaatctcaaggatggcgacgatgtgctgcagatttcgcatggcaacacactgcttagcctcggccaccggttcggcggccctgacctcgatctgaacgaacgcccggccaatggttcggtaaccgtgctcgacttcgacaccgacaagccgttcggcgaggccgtgaccatcgtttcgtacggcaagtagcaaatagcaagcaatacatatcgaatagcacgtacggtccacggcggcacgccgcaaacgaaagcgtcagcaggacacctttcgcctatagccgcatgcatccacgcgcacggttttcgccctgcgcgtgcaatggtatgccaagaaatagggaaggagtgctacccttaggcgagtaagtgtgaccgcaaggaggaaacaatgggagtcggagagatcgctggcctgatcgcggccatcgcgttcgcagtattggccggtttcatgatctatccgctgatcaggctgggcaagatgtttgatcagatatcgcagacggtccgggagtccggcgaacacgccatccccgcgctggacgaaggcgtgaccaccgtcaagcaggtcaacaagtcgcttgaagacgtgaacaagatttccgccgcggcttccaccaccgccaacaacgttggtgcgttgactgatctgtatggctctttcctcggtaagcccatcatcaagatcgcttccaccttctacgcgctgaaaaccacgggtcagtccttccttgcgaagaacgccgcgaaaaccaccgtcaacgacaccgccgagaagggggagtgatgttcaaacgcatcttctgggtcggcgtcggcgtggccatcggaatcgttgccgtcaccaaggcacaggcctatgtcaaggccaatacgcctgatgcggcacgccagttcctgcttggccccgatcaggacaatgtgccgatgaaaacactcgaagggttggtcaacgagttcaatgccacccgtcgagcccgcgaggctgagctcaaccgtcagtacatcgagcgcgccaactgacacgcgcatgccgccttgccatctagtcactgaaccagctagaacaaactagtcctcataatccagtctttttccaccaataccaggcgcaactgcgcccattacccaaacaaggagttcatccgctcatgcgcactgcggacatcgcaaagcgatacctcgattactttgccaaacatgatcatctcgtcatgccttcggcatccctgatttccccgaaccccaccacgctgttcaccatcgccggcatggtgccgttcattccctaccttcttggtgagcagaccccgccgaagcgccgcatgacatcgaaccagaagtgcgtgcgtacgctggatatcgatgaggtcggcaagaccacccgccatggcaccttcttccagatgcttggcaacttctccatcggcgactacttcaaggaagaggccatccactacgcctgggagctgctgaccaccccgcagagcgagggcggttacggctttgacccggaaaagctgtgggtcaccacctttaccgacgatgaagaggcccgttccatctggaagaacgagggcttcgatcccgagcacatgcagattttcggcatggaagacaacttctggaccaccggtggccctggccctggcggcccctgctccgagatctacgtggaccgcggccccgaatacggtcgtgatggcggtcccgcggccgatgagacgcgcttcatcgagatctgggacctcgtgttcgagaactacgaggtcgacaacgtcaagtccaagaccgacctgcacatcgtcggcgagcttgcccagaagaacatcgataccggtgccggtctggaacgcttggcctacctgatgcagggcaagcagaacatctacgagaccgatgaggtcttcccggtcatcgaggccgccgagcgcttgtccggccgcaagtacggcgaggacgaggccgcggatgtcaagttccgtgtcgtggccgatcacgtgcgttccgcgctgatgattatgtccgatggcgtgcgcccgtccaacgtcggccgcggctacgtgctgcgtcgcctgctgcgtcgcaccgtgcaggccatgcgtgtactcggtgtgaccgatccggtgattcccgagctgctgcctgtctccaaggaggccatggtcgccagctacccggagcttaacgacaccttccacgatgtctccgaagcggcctacggcgaggaagacgcgttccgtcgtacgctggagaacggcatcgagattctcgacgtggctgtcaagaaggccaagaagaccgccgacccggtggtctccggctctgatgcgttcactctgcacgacacttacggcttcccgattgagctgaccctcgaaatggccgccgatcagggcgtgaaggtggacgaggccaagttccgcgaactcatggccgagcagaagtcccgcgcccgcgccgacgccctcaagaagcgtcacaacgtggacctgtcggtctatgacgacttcaagaagacgctcgccaagccgatcgacttcctcggctacacggacatgtccgcccgtgccaaggtcatcggcatcatgcaggaaggcaagggctccgtgcccgccgtcaccggcccggccaacgtcgaagtcattctcgaccgtaccccgttctatgcggaggccggcggccagcttgccgatcagggcgagatcctgtccgacgacggtgcagtgctcgaagtcgacgacgtgcagaagcccatcaaggacctcatcgtccaccagtgccgtctgaccgaaggcacgctggtcgtcggcgccgaagtcaacgccaacatcgacctggcccgccgtggcgccatcgcccgctcgcacaccgccacgcacatggtgcacaaggcgctgcgtgaggagctcggcccgcaggccacccagcgcggctccgaggacgccccgaaccgtctgcgcttcgacttccagtggtccaaggccccggccaagtccgtgatctccgcagtcgaggagcgcgtcaacgacaagctgcgcgacaacctcgccgtgaccaccaaggaaatgaagttcgacgacgccatcgccctcggtgccatgcacctgttcggcgagaagtacggcgacatcgtacgcgtggtctccatcggcgaagacggctggagccgcgagctgtgtggtggtacccacgtggaccacgtcggcaagatcggcatggtcaacatcctgtccgaagcctccatcggctccggcgtgcgtcgtgtcgacgccgtcgtgggccagggtgcctatgacttcaacgctcgtgagcacgcgttggtctcccagctgtccgacaagctcaacgctcgcccggacgagctcgccgagcgtgtgaacgccctgctcgccaagctcaaggaatccgatcgtcgcttggcctccatgtacgagtcccagctggccgcctcggttccggcgttggttgctgacaccaagaactccgcggccccggtcaaggtggccgtcaagaacgtgggccacttcggcgcggtcgacgccctgcgcaagaccgtactcgacgtgcgcgcccagctcggtgaagacgcccccgtggtggtggccctcgccggcgtgaacgaggatgacaagccgatggtcgccgtggccaccaacgaggccgcccgcaaggtcggcatcaaggccggtgatctggtgcgtggcgcagccaaggtcctcggcggcggtggcggcggcaagccggacttcgcccagggtggcggtgtcgatgcctccaagatcgacgaggccctcgaagcgctcgagcacgaggcgcagaaagcctgattccgccagtggtgtggttaggcgttgatttgggtaatgcccgggtcggactggcactgtccgacccggagcttacctttgcacaccctgctggcaacattcatgttgccggcgactatttctttgctattgacgaggtcctgaacgtcatcgaagacgaacatgtggaccatgtaatcgtcggactgcccctgcagatggacggtacagaaggcaaaagcgccaaaaaagcgcgcaggtgggcggccaatctggagaagaggctgcaagcagagagtgaagacagtgattctacggagtatcagattccgcaggtgtcattgatagatgagagattgacaacagtcagtgcgcatcgtcaactgttcgaggcccataaagcttcgaacaagcacaggccggtggttgaccagcagtcggcagtggtgattttgcagacggcactcgaccgtacccgggagcagtgaggtatcggttatgaccgatgattttaacgagttctttgatgacaacacgcattgggtcgaacaggagtcagaaccaatgcgcggggccacgccgccagaaccgccgaaatcccgcaaggagatgcgcaagcgacgtgcacatcgcaagcgcaagcgtatcagtggcattatcatcgctatcgccatcgtcgccctgcttatcggcggcggctatttcggcgtaaccaagctcatcgcatggcgcgacagccggagcaaccagtcgacggccatcgcggactatcggggaccgggctatggcgaggtcgaattcaccgtgagcgagggccaaggcgcggcggagatcgccgataatctgctcaaggccgaagtcatcaagtctactgccgcgttcaccagcgtggtcaacgccaatagcgcgacactctatccgggaacgttcacattgaagaagcatatggccgcatccgatgtgatcgccgttctctccgacaccaaccaggcggcgggcttccttgaggttcatcccggtgaacgtgccaccgatgtgttcgccgacgccgcgaagctttccggcatttcccaaagcgaattcgacacgattatcaagaacaagggtaaggatattctgcccaatgaagcgggcggtagctttgagggatggctggagccgggaacctacaacgtcaagagcatgaagagcgcttcggaaatcctcaaggccatggtcgataagcgtatcgccaagttggatgaattgggcgtgccgaccggcagtgaccgcgaacgggtgatgatcatcgcctctatcgccgaggccgaggtcaacaaagccgattactacggcaaagtgacgcgagtcatcgagaaccgtttggagcagggcatgtcgttgggcatggattccaccgtggcctatggcaataacgtcaagcccgcgcaggtgaccaccgagatgacccaagacgagtccaacccgtacaacacgtacaagatctccggcctgccgcctacgccgatcagcaatcccggcgatagcgccattcaagcggcactgcaccccgaaagcggcaattggctgtacttctgcacggtcaatctggacaccggcgaaaccaagttcgccgtaaccgccgatgaacatgaccagaatgtggccgaactacgcaagtggcaagccgaaaaccagtagtcgcctcattggctcccctcgccgaggggagctgtccgcaaagcggactgaggggagtaatacgggattaagccccaacaaccaccgccacaatcgcgcccgccaatatcaccggcacatacggcaccttgcccgcatgtgccggtgatgtgcgttgtgggtcgaatcgcgtccacagggcaatccatgtgatgccggcaacgcccatcgccagccaccagaccaccacaggcaacaggccaaacagtccgacagacaatcccataggtatcaaggcggtcacatcgccgaatcccaatgaccgcggcaccagcaacgc

SEQ ID NO: 2960 - DNA, 4922 bp, Unknown
  R19_24m  MAG No. k141_7459
acgagatcgaaggctctgcagaacaaccatcgacgccctttctctgtatctcgatgaggccgaggcccaggtgcgagccgacaaagagaatggcaccaattcgtatttgttccgcgggtataacaaatgccgtcgcgccctgcttttggcgcgctcgggcacagattcctccatggaaacacgaactcgtttggttctcttgaaatacggtctggattgcccgcaggtgaattatccaatattcgtaggaaacaacaccagacccatatatctcgatcttgcataccctgaattcaaggtatgcatcgaatacgaaggctctcatcatgccgggcaatggctgaatgacgcgagacgccgccagatgatcgaagacgctggctggaagtacattcaagtcaccaaattagatattggcgacgaagcgggagaagaggcccttgcccgaagagttgccgaaaggatacaggaggttacgggcaaaacggtccagctcacgatgcggcaaactacccagcaaattagcgatgtccgaaagctacgccgtattccactgtacaaacggctgaaattcgagcctctgctgccaattattccgacgacgcaggaataataagcccggtagagtcagtccgcaccgtccgcaccgcgctacggtattcaaaacccatttcaaggggctgatttggcctccgccggaggtctacttccgtttcaaggggctgatcatccggtagaccacgtgtatcaatgcccttacgtcaacgccattccgccgttttggagccgcgtctactcaggcatcagccccttgaaacggaagtagatctctccagaacgtcaaatcagcccctcgaagtccgttttggcctcaatggttcctgccgaaccacaaaaaagccactcctctgccatacgagccgaccgcacagcaggcacgtgtcatttgccgctgcggacctcggactccatggcttccatgggctcgtcgacgagcacggtgccggacggcagggtgccgggcagcggatcgtccatgtagtggtcgaattcgtagagcatgcgcttgttcggcttggcggtcagcaacgaaaccaccacgatgaacagcagcgaaatgatgaacgccggcagcagctcatagatggcgaatacgccgcccaagggcttgacgaggttgtgccagatcagcacggccgccgtgccggacagcatgccggccacggcgccggccttgttggcgcgacgccagtatagcgagcacagcatcaacgggccgaatgaggcaccaagcccggcccacgcgtaagacaccacctggaagatcgacgagttctggtcgtatgccaccagaatgccgaacaggaacatgaccaccagcgtgaccctggccacaatcatgacctgcttgtcggtggccttgcggtgcagcagcccgcggaagatgttctcgcccatggccgaagcgccgatgatcagatacgaggagctggagctcatcgaggccgcgaaaatgccggagaccaccacgccgcacatgaagctcggcagcagggtctgcgccagcacgatgaagatggtttccgcatcggtggaggtcagcagttcggtgggcatcatcgcacgccccaccaagccgatgcacactgcgcaacccagcgaaatcacgcaccaggaggtggcgatgattcgggacttgcgcacttcttccacgctgcggatggacaggaagcgcaccagcacctgcggcataccgaagtaacccaggccccacgccagcatggagatgatggtgatgatgccgtagtcggagggcgcgccgaacacggccttgcccgcctcgacgagctgctggccggtggccgggtccagcttgggcgcggccacctgcgtgccggacaggtagccggggatggcacgcaggaattccacggtgttgtcgacaccgcccgcgctggccacggtgccgatgaacaccaccgcgagcgcgaagaacatgagcatgccttgaatgaagtcggtcatcaccaccgacaagtagccgcccaccacggtgtagacgaacacgaccaccgcgccgatgatcatcatgacgtggtagtcgaaaccgaacaacgtggcgaacagcttgcccacggtcacgaagcagctgcccacgtacacgctgaagaacaccaggatgatcacggccgcgatggtggagatcacgcccttcttgtcatggaaacgcttggcgaagaagtcaggaatggtgatggcatcgtcggtcactaccgagtagcggcgcagtcgccgggccacaagcttccagttgagataggtgccgagcgccagtccgacggcggtccacatcgggtcggccgcaccagtgaagtaggccaggcccggcaggcccatcagcagccagccgctcatgtcggaggcttcggcgctcagggccgtgagccacggccccacgccgcgcccgcccgcaaagtattccttggaggaggagttggagcgtttggagtagatgaatccgatggacagcatggccgcaaaatagatgaccatggccagcagaatccagaaatcgttggccaactgcgcccctcctcaatcatgacgccaagcggctaccgccatggcagaactatgtgctgatatgcgattgacgccggagcggcgtcatacagaccgtcacagccgtgaatacggccgcaacgcacttcgcctgatggtagtgaatacaagggctcaagcaccttccaccgtttccatactgagacgctgttttatccgagctcccctcacctgaggggagccaagatgacggtcagatgtcgtagcgccaggacttgtcggtcaccacgcgggccatcgccaaaccgatcggcagacagataatcaccatgaacgcacggaacgcccagtccagcgcattcatggtctggaagctgccgaggtaccacatggcacgatacatatacagaccgggcaccatgatcacgatcgacggcacggtcaggcagatgcgcgggtagccgaggtgcggcggtagccagccacgtcgcacggatgaacgccacaccgatgccagaatgcccgccagaaacgcgccgatgaaggtagccatctcgggtgccacgttgaagtcttgcaattccaagcgcagcgtgtccgtgatcgcaccgatcagggcggcggtcaggcacatgcgctgcggcgaattgaacagcacggagaagccccacacgccgacgaacgccgccacgaatcgcagcaatccgttgacccacgggtcaagccccagtggctcaaagccttccgggtgcaggtgcaccatcacggccacggcccagcctgccagcgtggccatcaggatgatgcacagcacgtacgccacgcgctggatgcccgaggggaagtcgattttcgccatgtcgagtccgccggtgatgagcgggaaaccggggatcacgaacagcatggcgccgatgtaggccgtatcgtgcgagagcgcgactgggtcgaaaatgccgatgagtcgcagggtgccggtgcaggcgagcgccgccgcggccacgcacacaaaggtgacgaagaactggttcagatggtatgcaaacagccggcgacgcatccactggccaaggcccgcgcccacgaacgcaccgatcatgtcgtatgggccgccgccgagcaggaacacgaaggccgcgcaggccagggcggaggccagaccggagaaccacggcttgtacagcggcttgcggcgctcaatcagatcgagtcgctcgtgcgcctgccgcacggtgataccgcccttggccttctcttcgtcggagcgctcgttgaagtgttcggcgtattccttgggcacgcgattcttacgcttcgtactgcttgcagcagggctttcggcgattgcgccgttcgccgcgttcgccgattcaaccgactcattggagtcaccggtaaacacttcggcatcgtcgtaggccttctcttcggccgctttgtcttcgaccggagtgacttccgcgctgtccgccaaaagtcggtgggcttcttcattgtcatcatccaaggacttggccacggaggtcacgagtaccttggttttcaacgcaagatccagcgcctcgtccacgctgccgttggccgcctcagcctcggccttggcacgttcgcgcaggcgcttggccagatcggccgaatactgcgaagcgtcacgttcgtccaaatgcttgaccacgccatcggacagttgcgaatcgacgtgatacatcgaccccttgccgagattcacggagaaccagtcggcgaaatgttccagcagccagatacgttcggtgttcacgccggtggtcggcaaatccacgacttcggtgatgcggttacgaccatccgtgcaggtggcctcgatatccgtcaggttcacgtcggcgcgtacgtgcacgcccagcgggtaggcgatgcggtgcatcatttcacgcacgcggaaggagccggtgccggctcccaagtccagcatgccgacccgtacaatcacgctggctttggcggcgataccggcgtccaccaccggtttttcccaatcgcgtgcaatatcttccatgtccagcggaatggagtgggtgtggaatttacgtacagccgttgcgcctttcgcttcgggcgcactttttttcttctgttcgctcacatccctcattactactccctgcctcccccgccagcaatcgtaaggtgctcaaatcttccgcgaatcggacagtgtctcatatgctgtccgatattcggtctctataggtggacaacttggcgcactatatggactccgtaacgcaaatagcgatttcgcggggatacactattgcccacacaacaaccacgttgaatatgggctgtgggctcgcaacgactggcctcaacaactg

SEQ ID NO: 2961 - DNA, 2947 bp, Unknown
  R19_24m  MAG No. k141_7543
catcggccgccaccagagccgactggtccgcacgcgcgtggcctccgacctctccccgtggctgtccaagacttcggtcggcgacatccacaccgtggccatctcccacggcgagggccgcttcgtggcctccgacgaggtactcgcccagctcagggccaacggccagatcgccacgcagtacgtggacgagaccggcacccccggcatggacctagatgtgaacccgaacggctcgctgctcgccatcgagggcatcaccagcccggacggccgcgtgtttggcaagatgggtcactcggagcgttccggcaacggcctgtacgtcaacgtgcccggcaacaagtaccagccgatcttcgaggccggcgtggaatacttcgccgcctgataatcggcgcgtatcgcgtctgatacggcacacagggaaggaactctcgggttccttcccttttttgttcatgccggtcatgggctaaggttggggtgttcgcactaccgaatccgccgctgaaaggacctgtcgtcatgccgatcaacgaggcattgttcgccgcgatgaaggccgccagctacatcaagcccaacgcgggcaagtcgtacaaattgcagcgcgtggcggaagagcttatcgccaagcaggcacccgccaatccgaaatgccgtgtcgaggacgccttcgcgcctatggcggatggatatgccgtaccattgcgagtgttcacgccgctggtcgcctatggagcgcccctgcccgaagccctggaggaatcttccgccaatggcacgccagtggcctcggcaatatccgcgattctgcccgccgtattacccaaagtcctacccaaaatacccatcaaggaaagcacgtcgagcggcaacaccgacggtattcccggcaatgccaacacggaacttccctcagtcacgccgcgtggcacgatcctgtttttccacggtggcggttggaccacaggcggcatcaacctgtacacgcaggcttgcgcgcatatggccgtacgtctgcaacgccgtgtgatctcggtcgagtaccggctggctcctgaataccgcttccctactgctgttgaggattgctatgaggtagcccggcagctgtttgctggggaattgccgatttctggggtgggtggttctgttgatgttgaccacccccagtcggctgcgccgacagcccccaccggcgggggcgatatatctgcgacaatcccagcaccggatcccgacagcatcgtgctgtttggcgacagcgcgggcggcaatcttgcggccgccgtctcgctcatggcccgcgaccgcggcgagttcatgccgcgcacgcagatgctgctttacccggtggtcggcaacgactacaatcccgagaccagcccgttcgaatcggtgcggaccaacggcaccgactacatcctcaccgcacaggacatggccgactacatcgacatgtaccgttcgtccgtggccgacctgaccaatccgtatttcgcgccgctcaccgcgcatgacctgagcaatcagccgcgcacgctggtgttgtccgccgaatactgcccgctcagagacgaggacgaagcgtacgcccgtcgtctgcaattggtgaacgacaacgtctcctgttaccggattcacgacggcatccacggttatctgctcaacacgtcggccgtagggctggtgtccaccacttaccggatcatcgagcatttcctcgacgacacaccgctggtgccggctcccggcaccggcaccaccgccaacgcaccggagggaggcgacgcatggcaagacgtacttggtaccgactagacaacatcggcaagttctactcctcccaggctggccgctcctcgcagaccgtgttccgctattcggccgagctggcggacgacatcgccccggacatcctgcagcacgcgctcgaccatgccatcgcccagttcccgagcttcaacgtgcacctgctcaatggcatgttctggcattacctcgaacagtcggacggccggccgctggtggagccggaacatctgccgatatgctcgcgactgcattacgggcccaaaagcatgctgttccgcgtgagttatttccgcaatcgtgtcaatctcgaggtctcgcacatcatttcggacggtcgcggcgccatcaacctgttcaagtcactgttgcacgcctacatcgccgagcggtacgacgtgccgggcgtgccttcggattacgacggctcggacagcgacaaagccgaaaacagcttcgacaaatactacgagaaagacaaggccggtgccgcgcccggcacgaagatctaccggctggccggccccatcgaccgggacgcgcccacgttcatggaatatcacgtcagcgccagcaaggtgcttggtgcagcgcatcagtgcggagtgagcctcacctcctacctcatcgccgcgatactgtgcgcgattcgcgacgtcatgccctcgcgcgcccgcaatcgcgcgattcgcgtggatattccggtcgacttgcgcgccttcttcaggtcggagaccgtgcgcaacttctacggcatgacttacgtggcgtacacgccggccgatatcgaagccgatgaggactccgcgaaaacttccgcaacgggcccagacgcgaccggcgacggccagcagtccgccgcccgcaccgcgcacggcaacggtatgggtggattgctgaccgatgagccgttggccgacatcgcccgccatgtgcaggagcagctcgaccatgccaccagtcgcgagcgcgtcgaatcgcatatgaaccgcatgattgcgctggaaaagaatccggcgctgcgtctcgcgccctcccctgccaaggactgggtgctggagctggcccggttcatcgccgaccgcgagaccacgaccaccgtctcgaaccttggccgagtcaccttgga

SEQ ID NO: 2962 - DNA, 6116 bp, Unknown
  R19_24m  MAG No. k141_7643
cacgatagagaggtaggaaaacatggcagagcagacggtcaccgtaggcgttggggcattgagcatcgaggacgttatcgccgtagcgcgcggcggtgccaaagtggcgatttcggacgaatcgaagcatgagatggcgctgagtcgcgcggttatcgatcatttggccgacgacaccgtgccgcattacggtatctccaccggattcggcgcgctcgcctccacctccatccccaaggaacagcgtgcgcagctgcagaaaagtctgattcgctcgcatgccgccggtgccggaccggaagtggagcgtgaggtggtgcgcggcctgctggtgctgcgcctgagcaccctgtgcaccggacgcaccggtgtgcgcccggaaaccgcgcaggtctacgccgatatgctgaacgccggcatcaccccggtggtctacgaatacggttcgctcggatgctccggtgatttggcgccgctcgccgcctgcgctttggtggcgatgggcgaaggcgaggcccgcaacgctgacggccgcaagatcggcggcggcgaagcgctgcgtgcggccggcatcacgcccgtcgatttgaaagagaaggaaggcttggcgctggtcaacggcaccgacggcatgctcggcatgttgtgtatggccatcaccgatctgcgcctgctactcaagacggcggacatcgccgccgcgatgagcgtggaaggcatgctcggcaacgaccgcgtgttcgccgccgacttgcaggcgctgcgtccgcatcgcggccaaggcgattccgccgcgaacatcgcccgcatgctcaaggactctggtctgatcgaggccggccgcccgggctccaccgtgcgtgtgcaggacgcctactcgctgcgctgcaccccgcaggtgcacggcgccgcccgcgacaccgtggaatacgcggcctccgtggcgggcgtggaactcgcctccgccatcgataacccgtgcgtcacgctggacggccgtgtggagtccaacggcaacttccatggcgcgccgctggcctatgtgctcgatttcctggcgattccgaccgccgacgtagcctctatctccgagcgtcgtaccgaccgcttccttgacgtggcgcgcaaccgcggcctgccggcgttcctggctggtgacccgggcgtggactccggtttcatgatcgcccaatacaccgccgccggcatcgtctccgaaatgaagcgtaacgccgtgcctgcctcggtcgattcgattccaagctccgccatgcaggaagatcacgtgtcgatgggttgggccgccgcccgcaagctgcgccggtcgattccggcctttgcgcgcgtgctggccgtggaactgctgtgctcctgccgctccttcgacttccgcaagccgtaccgtccgggtgcggcgggcgccgccgtataccgcgtggtgcgccagtacgccaacgaaatcggccccgacgtacgcgatacctggaccaccccgcaaatcgaaggcgtagccaacgccatcctctccggcgaaatcctatccgccgccgaagctgccgtcggcctcctgaaatagatgtgagctccctcatcagagggggctactgttcaccctccccaccaaaatccaaaacttgagtcacctgcactcaagttttgggaatagaatgggttccaggtcggttgaccatatcagacaacgacaagttgcggtctgcggtggcgcttgcggggctttcgaagcccgcgagccgctccgcgcgggccgcatgatatggaggaatacgatatggaacagaagttcaccactatggcccaggaggccgtcggcgacgcgattcagagtgcgtccgccgcaggaaacgcgcaggttgagaccctgcacgtcatggatgcgttgctgcgtcaggaaaacggcgtggtgcgctccctcatcgaggccgcgggaggagacccacaggccatcggcgccgccgtgcgcaacgccttggtcgccctgccgagcgcatccggctccagcacttcgcagccgcaagccagccgccagctgaccgccgccatcgcccaggctgagaaggaaatgcagcagatgggcgacgaatacgtctccaccgagcacctgcttatcggcatcgcggccagcaagccgaaccagtcggccgaaatcctggagaagaacggcgtcaccgccgcctccctgcgcaaggccgtgcccggtgtgcgcggcggcgcgaaggtcaccagcccggacgcggaaggctcgtacaaggccctggagaagtactccaccgacctgacggccgccgccaaggaaggcaagctcgatccggtgatcggccgtgatcaggaaatccgccgcgtgattcagatcctctcccgtcgtaccaagaacaacccggtgctgatcggcgagcccggcgtcggcaagaccgccgtcgtggaaggcctggcccagcgtatcgtggcgggtgacgtgcccaccaccctgcaaggcaagaagctcatctcccttgacctaggctccatggtggccggctcgaagtaccgtggcgagttcgaggagcgcctgaagagcgtcctcaacgaaatcaagaacgcggacggccagatcatcaccttcatcgacgagattcacaccatcgtcggcgcgggtgcggccgaaggctcgatggacgccggcaatatgctgaagcctatgctggcccgtggcgagctgcgtctgatcggcgcgaccacgctggacgagtaccgcgagaacatcgaaaaggatccggcattggaacgccgtttccaacaggtgttcgtgggcgagccgagcgtggaagacaccatcgccatcctgcgtggcctgaagcagcgttacgaggcgcaccacaaggtgacaatcggcgatgacgcgctggttgccgccgcgaccctctcgaaccgttatattccgggccgtcagctgccggacaaggccatcgacctggtcgatgaggcggctgcccacctgcgtatggagctcgactcctcgcctgaggagatcgatgaactgcagcgcaaggtgacccgtcttgaaatggaggaaatgcagctcaagaaggctgaggatcctgcatccaaggagcgtctgggcaagctgcaagccgaactcgcggacacccgtgagaagctcagcggcctcaaggcgcgttgggatgcggagcaggccggccacaacaaggtcggtgacctgcgtgccaagctcgatgacctgcgtgtgcaggcggacaagttcacccgtgagggaaatctggctgaggcctcgaagattctgtacggagagattccggctattcagaaggaactcgccgccgcggaaagcgcggatgccgaatctgccgatgccggcgcggccaacccggccgatgagccgatggtcccggaccgtgtggacgccgactcggtggccgagatcgtctccgactggaccggcattcccgttggccgcctgatgcagggcgagaacgagaagctgctgcatatggaggactacctgggcaagcgtgtgatcggccagaaggaagccatcgccgccgtgtccgacgcggtgcgccgttcgcgtgccggcatctccgacccgaaccgtccgaccggatcgttcctgttcctcggtcccaccggtgtgggcaagactgaactggccaaggcgctcgccgacttcctgttcgacgacgagaaggccatggtccgcatcgacatgtccgaatacatggagaaggcttcagtctcgcgcctgatcggtgcggctccgggctacgtgggctacgagcagggcggccagctgaccgaggccgtgcgccgccgcccgtattccgtggtgctgttcgacgaggtcgagaaggccaatccggagatcttcgacgtgctgctgcaggtgctcgacgatggccgcctgaccgatggccagggcaggaccgtggacttcaagaacacgatcctgatcatgacctctaacctcggctcgcagttcctcgtgaacgaggacatggacgccgacgccaagaagaaggccgtgatggacgctgtccacatgaacttcaagccggagttcctgaaccgtctggacgacatcgtcatgttccacccgctcacgcgcgaggagcttggcggcatcgtggatatccaggtggctggcgtggcccagcgcctgaccgatcgccgcatcacgctggacgtcaccgactcggctcgcgaatggctggccaacaccggttacgacccggcctacggcgctcgtccgctgcgccgcctggtacagaccgaagtgggcgaccagctggcccgtatgctgctggccggcaaggtccacgacggcgacaccgtgctcgtcgaccagaccggcggcgaacatctggagctctccgcttgggcgagcgaccagatcgtctccgacgatccggacgtgagcgtgggcaacgtcaccgaagacaagtgacaatcactggctccctctctgagcaaagctgtcagcgaagctgactgaggggagttcgggctggcgagcttcactatattggctctcctctgaggaggagagccttttcgctaccatggtgctgaacttcatacgaggaggaccagtgactggacgattcgcgccgacgccgtcggggcgcatgcatatcggcaacgtgtacgccatgttgggtgcatggctttcggcccgttcgcgtggcgaccgcatgctgatgcgtatcgaagacgtggacaagccgcgcgtggttgccggtgcggaccagctcatgatggacgacctgcattggctcggcctcgactgggatggcgaaccgatgttccaatcccagcgcactgagcgctacgaatacgctctcgaatgcctgcgctcgcaaggtgtgctatacccctgtttctgctcgcgtgccgacattcgcgccgcctcggcccccaacgagggcgacggctttatggtgtaccccggcacgtgccgccgcctgctgcacgaccatcccgacgaggtccgtgcccgtctgtttcgcggcgaccagcattccatccgtatcgccatgccgaaaccggcagcgggagaaaagcaacgtacagtgcctgacgattccgctgcgctgtcgggagccgtgccgccggaacagcagggcgatgccggaatcgttgatggtgtcgcatgctttaacgaccgtgtctatagtccacagcactacgatttggcccgcgaggtaggcgattccgtgattcgccgagccgatggactgttcggctatcaactagtcgtggtcgtggatgacctcgatatggatgttgatgatatcgtgcgcggccgtgatctgctgcgctccaccgcgctgcaaatgtggattcgccagtgtctgttggctggcggctttgagccggaatgcggcaacacggaaaagcctctcgccgagcaccccgagtatgcgcacctgccgctcatcgacaatgcggccggtcggcgtttagccaagcgcgaacgttcgctggatatgggagccttgcgcgcccgcaacgtaacccccgagcaaatcatcggatactgcgcctggttgctgcgtctgcaacccactccaatcccttgcaaacccgccgatctgctggcagatttcagctgggagccgctgcgtgccaaccacctggaccgcgcgctgaaaccggacgatccaaccactccacaatggctggcagaagcgttaggctagaggcagcccaacaggaaggattccaatgtcgtcgaagctctggagaaacgtggcgctggcaggcgtggccgccgccggtgctgccgtgtgggccgtggccccgcgcacgttcaatgacaagcgtcgtaatttcgtgccctccattccgaaggtatggtatgcccatcgtggcttgcatgatgcgggttctggtttggtcggctataccgatatcgctgattatggtggggataattcggtcagcgcccaagccgataccactgagcgatccatcgccgaaaacgatgattatgtgtcgcttgcccgtcgcatggctgtcaaggccggctacggcagtgcggatatgaccggtccgatcgctcctgaaaactcgctggccgcattcgccgccgcctgcgaggc

SEQ ID NO: 2963 - DNA, 30306 bp, Unknown
  R19_24m  MAG No. k141_7847
atgtatgtacacggatgccacggtgatcgtatagccctcaggcgttttgacatcggtttcgatccaacgccccgaatccacatcctcgctcagacctggcagaccatatcgcttgtcaagcacttccaagtcggtgagcagtccgactcccgcgcggcctttcacccggcagacctcgttcatggcatggaggttggccggtgcctcgattttgccggcggtggcgtattcgaaaccaaattcatcgaaaatagaatcgacatcgtcttgaggcgcgcgaacttcctgtatgcaccagacatccggcgcatgcttgccagcccaatcctcgatgcccttgcgtttggccgcacgaatgccgttgacgttagacgtggtaatggtgatggtcatgcggccatactattttggcctccctacgaatcgaaccggacaccggcggccgcgatgctcagctttctctaagcttgagtgctagtgttagcaaggttgcaaccgttatacgaaacgaggaatcatgggactgttcggattcggcaagaagaagagcaagaaggaagccgagccggccattgagcctgtcgatgaagacaaggtggccgccgcagaagcgaacgctgccgcaaaggccgagagcgcggagaccgtgctcgccgagccggccagcgaataccagggccgcggcgaagagcgaggcccgtgggacgtcaatgatgaggacgtgcccgattatgacgattatctggatctcggcgcctactacctgcccttcctccagggcatccagctgcgcatcaaggccaaccgcgccacccagcaagtgcttggttccaccatcaccttcggctcctccagcctggagatcgaagcctttgccgcacccaagaccctgggactgtgggatgacgttcgcggtgacctgcttgaagccaacaaggccgcttctgaagtggacggtgtgttcggcaccgaactgaagctgccggtcaatgtcaagggcggcaaaaccgtgaacacgcgcatcgttggtgtggacggcccgcgctggatgctgcgtggcatcttctccggcaaggctgctatcgatccggacagcccggagaccgaggcgctgaacaagttcttcgccgacatcgtcgtcgagcgtggcgaggagcctttggcgccgcgcgatctgatcccgatgcatccgccggtcgcccccgctgagcgtaaggccgccaaggccgcggccgaagccggcgaggagaacggcaaggaacacttcaaggacattccggacaacaagccgaagggtccgctgagccaggaccagcagaccgaagtgaagaccacgctgtctcgcggcccgatgttctccgaagttcgctgatttataggaagagacttggcagacaacaaacgcaccggcctgtccgctctagccgacgccggcaatgaaggcgaggatttctccgtcatcgacgccatcggtggcccgcgtggcgtcatcgaatccatgctgcctggcgtggtgttcgtcgtactgttcgtggccacgagcaatctgaatctcaccattgcggtttcggccgtgttggcggtattgcaggttattgtgcgactgattcagcgccagtcggtaatgggcgcggtctctggtctggtggcggtaggcatctgcctgatttgggcatggcagactcatgaggcccgcaattactacatcttcggattcattaccaatgccggctatgccgcgttgcttgccgtgtcgctgattgcgcgcgtgcccggactgggtttggtcgtcgaattcatccgtagcctgcccaccgagcatttcaaggcatggttccatgactggatggacgacaaggccctgaaacgcgcctatatgattgtcaccggcctgtgggtcggtctgttcctgctgcggctggtggtgcaggtgccgctgtatctgaccaaccatgtagctgcactcggcgtgacccgcctgctcatgggcattccgttctgggcattggcgatttgggtgagttacctcattattgccacgccgatgcaccggcataaggtcgcggctaggaagatacagactgaagtcgctgttgatgccgaacttgaaccgagcgcaaccggaaaggacgatgatgcaagctgaagttcgtatcgaacgatacgccgaccaaggccgctgcgtggcccatatcgacggtcgtgtggtgttcgtccgcttcgccttgcccgacgaactcgtgcgagtcgaacttgacgagccccacgaccgggacgaccggttctggaccggcgaagtcgtcgaggttctcgagccgtccgaagaccgagtcaccccggcatggccacttgccggtcccttggcgatgggcgggggagtgggcggcgcggatctcgtgcacgtctctttgcccggccagctcaagtggaaggccatcaccgtctccgaacagatgagccgactcggccatatcgacgtggccgttcccatcgagcgcatgcccggcgacaaggcagccggcggcctcaattggcgtacccgcatcgaaatgattgccgacgacaacggcatgccatccatgcgccggcgcggcacacacaaccgcgtggccatcgacaccatgccgcttgccacgcgcacgctgctggacgtcgccaagcgcgaacacgtgtgggaaggcggctttgaacccggctcccagattcgtctttccgtgcccgaaccgcgcggcgagatcgtcgataccgcggcagcagacgacaattacgccgtacttgtggacggcgaactgcgcgccggctcccagctactcaccgaacaggtgaccatcaacggcacgaccttcgactatcaggttgacgccaacggtttctggcaagtgcatcgccaagcgccgatcgccctcggtacgcacgtgatcaacctggtcaacgggcagctgcagtcagcggcggacgccgtaatctgggatttgtattccggttccggcctgttcaccctgccgctggccacaatgaccggtgaacgcacccgcatgctcagcgttgaaggcgcgcgtgtggccgtcaagaacgcccagcgcaatctgcgcgccatgaacctgaacgacgtggacgcccgcgcgggtgacgtctcgcgcacgctggaccatgtgccggcgcatctggccaagccgaatgtcgtagtgcttgatccgccgcgtgccggtgctcgtgccaaggtctgccgccagattgccgcggccggcgcacccagcgtggtctacatcgcctgtgatcccaccagcctcgcacgcgacaccgcgacactcatcggcgaaggctacgagctcaaagacatccgtgccttcgatatctacccgatgacccaccatgttgagacggtggccctgtttacccgctgacaggtgagcatatgacacgacgaattctcggattgctggcctgcatggcggctgtgttgtccctggccgcctgcacgccggccggtagggcggtcggcgatacccaagacagcatgccggaagtcgcccacgattccacacatcccacggatgtcacagtcggctttgtggggtcgactgacaccgccgcagacaagtccgccatcaatgcgctgtctgatgacaaactcaatgtctactatgcctcgctcgaaacatccgcaagctcggcaaacgcaactgatggtgtatccggtgaaaccgaatcttctgacgccggcactaccagcgaaaacggtgccgatagtatggatgctcatactggcgtcgacaagaatgcggccaccgcacagcagggtgttgccgatttcgtagctcgcgcggtcaaaatcgtggttatcagcggcatcgacgttaccgacgccaaccgggagagctggaaccagacgttgaccaatgcgcgtgaagccggtattccagtcgctctcattgatccaaagcatgcgcccgaagatgaactgctgtacgccgtcatccttcacctcaacaccaacagtgccgattctggcgacactgccgataccaagccaatgactattactgacgccgtgctcaccatcacgcgcgacgaaccccacgaacgcgagatcaaagtcaccgtttcctgagccgaatcaggcccttgaagctgagaaagcaccctgaatcatccctgagccttagcggattgcgaaacaagacgcggtaggctggggaatatgagtgcaacaacagccgtggaaatgcctgaaatcggagcaaccggtcttacccccaaagaagtggtgcagcgtatcgaaagtggccaatcgaatgcggtgaaaacatccacctcgcgttcggttcaagatatcgtgcgagccaacgtgttcacgctgttcaacggcatcatcttcgccgcgatggtactggtgctgatcaccggttcctggagggacgcggtgttcggtttcgtcatcatcatcaacacgggcatcggcatcgtcaccgaactcagggccaagcgcacgttggataagctttccatccttgtggcctccgaattcctcgtgcatcgtgacggcagggacgtggaggtgccccacaacgagatcgtgctcgacgacctgctgtggatccgtgccggcgaacaggtgccggccgacgggcagatcatccagacctggggactggaactcgacgaatccatgctcaccggcgaatctcgtaccgtgcgccacaaggtgggggagcaggtgtattccggtgccaccgcggtctccggcatggcattggtcaaggtcaatgcggtcggcagccattcctacgccgccacgctcaccgcgcaggccaaggtatacaagaaaaccgtgtccgacctgaacaagggcatcaacacgattctgaaattcatgaccttcctcgtggtaccgctgtgtattctgctgattctttcgcagattcatacggtcggcggttggggcacggcactctccaccggcgaatggcggcaagccgtggtttccgcggtcgccggcgtagtaggcatgattcccgaaggcttggtgctgctgacttcgctgaacttcgcggtggccgccatgcgtctcgcccgtcacaatacgctggtgcaggagcttgaatccgtggagacactggctcgcgtggacgcgctgaacctcgataaaaccggcacgatcaccgatggcggtatcgccttcaaccggctcgtgatgctcgattccgccaatgcggctgcggaacaggcagccacgcaggccctctacgactgctgcaacgaagagcagcccaacggcaccggccaagccgtactcgccgggctcaaggcccaaggatatggggcaggtgcggttgagtctcgtgtcccgttctcttcggcgcgcaaatggagtgcggtgcgtaaatccggcgagacctggtacatgggagcgccggaggtgattatttctgcgcttgagggtgactattcgtcggtgttgcagcaggttaacgagtatgccaatgacggcaaccgtgtgttgcttgttgcgcggtctacagctcccctcagtccgcgaagcggactgagggacgcagttgagggagccaatgtctcggacggcccgcaactggatgtgcaggctgagccggtggcgttggtgttgtgctctgagaagattcgcgaggacgccgagcggacgctcgcttggttccgtgagcagggtgtgcgctgtcgtgtgatttccggtgacaatccagtgaccgtgggtgccatcgcccgcagagtgaaactgacaggcgaccatgagccggtggcgatggacgcgcgcgaactgcccgaggacgtgaacgaactggcccgcgtgctcgaaaacgtcgatgtgctcggccgcgtgctgcctgaccagaagaaggccatcgtgcaggcgttgcacacgcagaaccacgtggtggccatgaccggcgacggcgtcaacgacgcgctcgccatcaaggaggcggacctcggcatcgccatgggcaacgcggcacccgccaccaaagccgtggcccaggtggtgctggtggattccaagttctcgcacctgccggacgtcgtggcgcggggccgtcaggtcatggccaatatggagcgcgtggccagcctgttcctcgtcaaaaccgtgtactccgcgctgatctcgctcggcgtagtgctgacgcaaatcccatacccatacctgccgcgccatatcacctatatcggcgctctcaccatcggcatgcccgcgttcatcctggcgctcgcgccgaacacgcgccgctatattccgggattcctcaagcgcgtggtcacgttcgcgctgccgggcggcatcgccactgcgctgtcggtgctgctggccgcttgggtgctgccgccggtcatgggctggaacgtgaccggcgatgccgcggacctgtccgccctgcgcgccaccagcgccatcatcctgttcgcgatgggcgtgttcgtgctggcccgcgtggccagaccactcaacggttggcgtggcgtgctggtggcggtgttcgcggcggcgggcgtgatcggcgcgttcgtcccgttcgtggcgaacttcttcgccctgattctgccgaccggcgccacgatggtggccacgctgatcgcgttggccggttccgcgctgatcttcgcgctgtgcctgtggctggcgccgttcgtgcgcggactgacgggcaagctctcgcgtcggcattgagacggcggcgcgattgtctcatacttcaagccgacacgccagagcctcggtaacgtgcccgtaccatgtgtagcggataatcagcggcatcataagccgattcatgatttcggaggaagcatgtccttacgcgacgaccagctggctaccctcaaggcagccggcaaggacttcgattactacaacatcgccaatctcgacggcatcgatcatctgccgtactcgctgaaggtgctggtcgagaatctggtgcgcaacatcgacggtgccaacatcaccgacgagcacgtcaagaccctgctcgactgggatccgaacgccgaacccagccacgaaatccagttcacgccgtcccgcgtgatcatgcaggacttcaccggcgtgccctgcatcgtggacctcgccaccatgcgtgacgcggtcaaggacctcggcggcgacccggaggtcatcaacccgcaggtccagtccgatatggtcatcgaccattccgtgcagatcgacaagtacggcatcgccgacgcggtccagcaaaacatggacatcgaataccagcgcaacggtgaacgctaccagttcctgcgctggggtcagcaggcattcaagaacttccgcgtggtgccgccgggaaccggcattatccaccaggtcaacatcgaatacttggccaaggtggtcatgagcaaggccgaggccaacggcaacgcgctcgcctacctcgactcctgcgtgggcaccgactcgcacaccaccaccgaaaacggtctgggcgtgctcggctggggcgtcggcggcattgaagccgaagccgccatgctcggccagccgatctccatgctcgtgccgcgcgtggtcggcttcaagctcaccggctccatcccggagggcgttaccgccaccgatgtggtcctgaccatcaccgacatgctccgcaagcacggcgtggtcggtaagttcgtggaattctacggcgaaggcatcgcctccgtgccgctggccaaccgcgccaccatcggcaacatgggccccgagttcggctccacctgcggcatcttcccgattgacaatgtcacgctcgactacctgcgcctgaccggccgctccgaagagcaggtcgcgttggtcgaagcctacgccaaggccaacaagctgtggggcgacgcttccgacccggattacgtggaaccgcagtactccgaatacgaggaactcgacctcggtaccgtggtgccgtccatcgctggcccgaagcgcccgcaggaccgcattctgctgtccgaagccaagagcatgttcgagaagaccgccccctcctacgagaccgagaagaccgtcaaggatccggtggccgtgtccaccgacttccgtggcgatttcgacatcgaaaacggcgacgtggccatcgcctcgatcacctcatgcaccaacacctccaacccgtccgtgatgatcgccgccggcctgatcgcccgcaacgcacatgccaggggccttaagcccaagccctgggtcaagacctcgctggctcccggctcgcaggtcgtggccgactacctcaaggccgcggggctgcaggacgacctcgatgcactcggctaccagcttgtcggcttcggctgcgccacctgcatcggcaactccggcccgctgctgcccgagatttccgaggcgatcaacgccaacgacctgaccgtcaccgccgtgctttccggcaaccgcaacttcgaaggccgcatcagcccggacgtcaagatgaactacctggcctccccgccgctggtcatcgcctacgcgctcgccggcacgatggacttcgacttcgagacccagccgctcggcaccgacgcggacggcaacgacgtgtacttgaaggacatctggcccaccaactccgaggtcgccgccgtggtcgacggcagcgtgagccgcgagatgttcctcaaggactacgcctccgtgttcgacggcgaccaccgctggaagggcctcgacgtgccggaaggcgagctgttcgcgtggaacgacaagtccacctatgtgcgcaagcagaccttcttcgacggcatgaaggccacgccggacccggtcgccgatatccacggcgcccgtgtgctggccctcctgggcgactcggtcaccaccgaccacatctccccggcaggcgcgttcaaggcctccagcccggccggcaagtacctgaccgagcgcggcgtggagccgaagaacttcaactcttacggttctcgccgaggcaaccacgagatcatggtgcgcggcacgttcggcaacatccgtctgcgcaaccagctgctcgcctccgtgggcgaggaggtgacgcctggcggcttcacctacgacttcctcgccaagaagccgaccacgatcttcgaagcctcccgcgactacatcgacaacaaggtgccgctcgtggtgctcgccggcaaggaatacggcaccggctcctcgcgcgactgggccgccaagggcacggtgatgctcggcgtcaaggccgtgatcaccgaaagcttcgagcgcatccaccgctccaacctgatcggcatgggcgtgctgccgctgcagttcccggcaggcgaatcctatgagtccctgggcctcaacggcaccgagacctacgatatcgccggcgtcgagaagctcaacgagggcgtgacccccaagacggtccacgtcaccgccacccacgaggacggctccaagaccgagttcgacgcggtggtccgcatcgacacgcccggtgaggccgactactaccgtaatggcggcatcctccagtacgtgctgcgcaacctcatgaagtaaccaccttcttggctcccctctcttgaggggagctgtcagcgaagctgactgaggggagcaaggccggtatccgccaacggataccggccttttccatgcatgccaaaatgctatactgtatagcatcttcgaaatggaggttgccatgaccatggtccaaatgaacgttcgcattgatgcgaaactgaagaacgaggtcgaagaagtcctcaagggcaaaggcgtatcggtgagtgacgtaatccggtcgctgtggttatacatcgccgaccgcaaggaagtgccggcattggaaacgaccgccgaagagcaagcccgcgaggaggaaaagcagcgcaagctgaaactgattcgagaaggtgccggatacgtacacaaggaactggtcaaggccggactgatctcagaagacaccgacctcatggaaggccttacctacaagcagttccgcgacaaaatgtacgacgagcaacttgatgcgtattacaacatgaagagggccgattgatgaccgacgtttccatgcagcgtattttgcttgataccaacgtactgttggactatttgctccatcgcgatgatcacgccaagatggcggaagcggttatggaacttggcgcgaagaacaacgttacgttgttgtgcgcgtcattgtcgctgaaggatatcgcatacctatcatcatcggcgattcgtagggaattcaaaccgaatgaatcggaagtggagaatttcactcgcggctttctgtcgtcacgggtgccatggcgttgtatcgagcaggtgaaggaggtgtgtgacatcgtcgctgtcgatgagtcgacatgtgatagggctttttccctgcaaaaacggcatcgggattttgaagatgatctgatcatcgttgccgcgcaacaatccggtgccaactgtgtggtcacatcggatgccgaattaatcagtcattttcccgaatattgcaaaacaccggctgaaatcgtggcggcgctggaataaatgagcgtgtggctcccctcacggaggggagccaccaatgatgtgccggctactgtagcctactgcgcctgtagacggaactgcttccagatgtcgctgagcttctgaccgttgcgcgtgcgcttccacacgtccagaccgccgccgcgacgtcctccggcggcggcacgggccgcggcggtcggagtcggatattcggagccgtcatccagacggagacgaccgttttcggtgaccgtggcgaaccagcgctcgcccttgcgcggccgctcccacaccagacgctcgcccggcaccagcagaccagcgtcaatcacctgccggatcgtgacgcgccgcgaactatgagacggccgtggagaggtcttcgacaactcatcgacattctgcttggtcagatcacgggcgtccttgtcataccggatgccccagtattccacgatgagtcggaccgactcttcctgccgcgcctccagcagggcaggtgtgcagtcagcgaaatccttcaactgattggtcagcgggaaacgacgtgaatccgcgcgcaacagcatgcggtcgcgacgtgccggatattcactcaacctgtccaactgatcctcagggccctgcaccagcgccatattgccgagtcggtacatccagaaatcatgctgatcctgcggccagtccgcaaacgatttcgaccgttcgatatccaacggcataatcggcagcgcactgaaccggcgtggtcgatccaactgcatgccggccttctgctcgttggcgcgaatcagcagcagacggaccaaatcgccgtcaccctgcatctcgccatgcaaacggaccaatgcgccttcacggtcgccgtccgagacatgcaacccgttcacgcgctggaccaaatagcccttgtcaagatcacggatggcggcgttcgcataaccgcgccgctccaacgctccagtgcgattcagcgtgcggatgccggtcacctgttccaatgcggtcagaatttccagcagccgacgctcgtcatgggcgcccaacgattccaacgtggccgtggttctggcgatacgtgaggcacgaaccacgaacggcgacaaatcggcgtcgcccagcccgcgatacgaattgaccaacgcccacatggccacgggcttccactcgtggctgcggtaatcgtccaatccctcaagccggctacgcacctcggcgggcagtacggtatcgctggggcgcgcgatgatccgccacgccatcgcgtagggtgccagcacctggttgatgaacgtgggcaccgtgcctttgtcgatgtacggttgcagcacgtcggccaggaaatcctcgatgagcttgtcggtggccggcttgtgcgtgagcacgagatgcagataggcgaagaattcctcacagtcatgcggatcgtcgccaagcgggtcaatgatgtcatcccagcgggcggcgtacacgtcaagttcggcggtcgacaggctggccgtggcgcgcgccttgaacacgtcggacggggtgagcggcaggccgcgcatgttcatcacgtcgaagatgcgatgcgcgccgtcgagatcgtcggtggtcacgatgacgagcgtcacctcgttgaccagatactgcgcgaattgctggcgttcggatgccgaccaattggagatctcgtcgtacgtcttgcggatgttggcgacgatgttgcgttgcgcagcggtcgccagatcgtcgtcgttcatgtcgaacacggattcgaggttgtcctcctgcacgtgttcgcggaagaacgccgcgtcgcgctcgcgcaacgtgaggcgaggctcggtgacgatgccgcgcagcttgtcgccgggctccaccagcagcgcgtcgagttggcgcatgaggtccgggtctcgctccagatcgcgcagcacggcgatgatgatcgacagggataccagccgctgctgcccgtcgatcacgtcataacggttgtcgccctcgcgtaccagaatcagcgagccgaggaagtacggggtaccgggtgacttgcaggcgtcgtccaagtcgcttaccagttgcaggatgttctcggccttccatatgtaggcccgctggaatgaggggattgtgaaccggaaatccggggtgaacactttcccgagtggtagttccttcgcgctgattgccatgtcaatcccttcgtcgccggcctttggacggtatgccgacgtgccgactgtgctcaagcctaccagtgttcgcccggcggcgggcgcatcacgccggctcgggcaccgacccctcgtacaagtagaacgaagacgggttttctcccggcccggatgcgggcagtgactgctcgcacacctgcgtcaggccgcgatgtacatagaatccgacatcgcacgtggtatccgtgaataggaagtactgacgtatgccagctgcgtggaatgcgctcatcatcgtctcgaacatgcgccggcccagaccgtgaccgcgcgccgccggatcaagtacgaacagcaccacttcagccgaatactcatggccaatgttcgccgcctgcttacgcagttgcctatcgacatgaagagtcccgagaatctcgctcgcagctgccatgccgtcgtgggcaaacgccagttgcaatagcttgcgcaacgaatgacgccggtgcatgttcagcgggctgcgatggtcgagctcgtcgatacgccccacaatcaatgcgacgggtttatcttccagctccgcgacaaaggccgtggtcacacgtgccagacagttctcccaatcggcctcggctgccagcaagccggtccgctcatcatattcggcgtaccaagtgcggcgcaccaggtcgatcagcgccggataatcgtctttacgtaacgttcgaataatcgcttcactcatgttctccattatgactgatatggctcgataaccggacgtgttacagtcgcgccggcaaatcggcccgctccaccagcctcgccatctgtacgcggcccatattgagcttgtccgccgcggaggagagatgcgccttggccgtacgctccgagataaacatacgggaggcgatttcggcgttgggctatgtgctgcaagacgattcgccgattacggtgcatgccacgcgcatggtggaaacgcccgttacgctttgcgatgagcagaacgagccgatcgatcctattcatggaatgttcagctttgttcctctaagattggtactggaacaaacgctaaaggagcgattatgacattcggtcagcagccccagaacaacgggcaatacaacccgcaatacaacacgcctgattacaacgccgcccaacagtctggatatggccagcaatacgcacagtccggttacggccagaactactatgcccagccgcagggcgcccccacctaccagtacgcgccgcaggatgcggccggtgccggcgcgggtgccgccaccatcaacacgacgatgacctacaactacgaggaggcccgccgcgtctccgtagccaaggtgtacggcgagatgaccattggcatcctcgtcaccgccgtggtcgccgtgctcggccagatcaccggagcctactacagcttcctcatggccaccggcatggtgggcctcatcggcctgtgcgtggtgcagattgccctggccgtggtgctcggcatgcgcgtcaccaagatgaagtcggccactgcgcgcgtcatgttctatgtgtacgccgcattgatgggcttcaccttgagctcgatcttcatggtctacgacctcggctcgatcggcgtggcactcggtgtcaccgcagcgttcttcttcgcgctgaccatgttcggcatgactaccaagttcgacatgctcaaggccggcccgatcctgatgatcggcctgatcgtgctcatcatctcgcagatcgtgctcgccttcgtgcaggtcgacggcatgaccaagatcgtctgcgccatcggcctgatcctgttcgccggcatggccatctacgacgcgcagtccacgcgcgcgctgctgaccgaatacgaggcccagggcccggaaatggtcaagaagatctccatcctgtgtgccctgaacctgtacctcgacttcgtgaacatgttcctgtacatcctgcagctgctcggcaacagggactagcctcgccagccgattgatgggcggcatgtagcctgctcgtcaaacgtcacagcccgaccacattgtggccgggctttttcatgtctgtcacattcgcacgttaggctgtctccccgtgaaaagacaagaactcgtaggcatgctgagcctgttgttgaccgcgctgatctggggttttgcgttcgtggcgcaggtccagggcatggatttgatgtcgccgatgttcttcaacgccacgcgcttcacgctgggagcactgtctttggtgccgattctgctgtggcagcgtggccgggggagcgcagataagggcgatacagccggggtcgatgtcgttgggaccgaggcccccagggccgtctccacagatgccgcatcgaacggtgcatccgacgtcgttaccatcaccggtgccaagctgaatgcgaacaagcccgattcggccgtggcgcgattgctcgccaacccggtggtcatttccgtgatctgcggcatcgtgctgttcaccgccagcaccctgcagcagtatggcattctgtacggcaaatcggccggccgcgcgggattcctgaccgccatgtacattgtgatggtgccgttgctggcctgcgtgttcctgcgccggcgcatcggcatgctggtgttcgtggccgtggtgctgtccatcgccggcttctatctgctgtgcatcaccgatggtttcggttcgatcggcctggcggatatcctgctcgtgttcacggccgtgctgttcgccgtgcatattctggtgatcgatactttgggcggcaccgtggacgccatcaagctttcattcggccagttctgcaccaccgccgtgctgagctgggcgggttcgctgatcgaaggctcggtcgactgggtcggcgctgctcattcctggattccgattctgtacgccggcatcggctcggtgggcatcgcgtacaccttgcaggtggtcggccagcaatgggtgccaccgacgcgagccagcctgctgatgagcctcgaatcgttcttctcggcggtaggcggtgcgttgcttctcggtgaagtgatgaccccgcgcggttacctcggctgcgccctcatcttcctcggcaccctgctggcccaagcgccggccaggctgccgaagtggctgcaacggtgaatgaatcggacgcaggccgattccatagcacctcagtccgtggtcttaggcgcttcacccacttgcggcgcgccgttgatgtcgcggtggatgttctgcatttgcacttcgatgttctgcagcgaacgggcgcagtcgagcagtgtctgtgaatgctcgctgagcttgttgtccggcaaatcggtcttgtagcgcagcgcatgctccagcgacgcccaataatccatggcgatggtacggaactgcacctccaccggcgtgtaatgcgcgcccgaggagagaaacacgggcaccgcgtagattacgtgcaatgaacgatacccgttctgtttcgggttcttgatgtaatccttgacgcgcagcacctgaatatcggactgcgacgacagatagttggacacggaatacacgtcgtcgcggtaattacagatcacgcggatgccggccacatcgaacagattgtccttaatcgaattgacactgattggcagattcttgcgctccagcttgccaatgatcgaactcaccgacttcagacggcgttccatatgatgtatcgggtcatggctgaaccgcacctggaactcgtcgtcgagaatctccagcttggtgctgatctcgtacatcgcgccttcatacacctgcatgaggtcaacgaatttaacgacctgttcgggagtgaaggtgcctcccggaagatccagcgctttgagacgggcttgcagatcggaggttttgagtcggctatgtcggtcaagtatcacgtccaccaatatactcggcggattccagacaatctggatgttcgcggggaatctttccaagaacccatatttaagatcgtgacaaccaatggcatacgtgaccggagcatgacgaaccccgccgatagaatcggtcgttatgaatgaagacatgatgaccgaggcggagcgtgcctcgattgcagccgatggaaccgatagcttgctgggggagcgcggcaagggcgtattccatatccacacgctcggctgccagatgaacgtgcacgattccgagcgcatcgccggcgtgctggaggccaatggctacgtccctgcaaccgaggaccagatcaatgacaatgacctcgatctgctggtgctcaatacctgtgcggtacgcgagaacgcagccgaacgcatgtatggcaccatcggccgattcaatcgcgtcaaactggttcggccgaacctgcagatcgccgttggcggctgcatggcccagcttgaccgcaagaagatcgcggatactgcgccatgggtttccgcggtgttcggtaccaagaacatcgaagatctgcccaagctgttggatcagaatcgtgcgaccggcaaggcgcaggtccaggtcactgaacaattgcggcagttcccgagccagcttcccgccgcccgcgcctcccgcatcagctcgtgggtggcgatttccgtgggctgcaataacacctgcacgttctgtattgtgcccaccacgcgaggcaaggaaaaggaccgccgccccggtgacattcttgatgagattcgccaatgtgtggccgatggtgccaaggaggtcacgcttctcggccagaacgtgaactcgtttggttatggtattggcgatcgatacgctttcagcaagctgttgcgcgcctgtggaaccatcgacggtctcgaacgtgtgcgcttcacttcgccgcacccggccgccttcaccgatgatgtgattgcagccatggccgaaacgccgaatatcatgcatcaactgcacttcccgctgcagtccggttccgaccgcatcctgcgcgcgatgcgccgctcctacaggtccgccaagttcctcgatatcctcggtcgtatccgcgaggccatgcccgacgcccaaatttccaccgatatcatcgtcggattccccggcgaaaccgaggaggacttccagcagaccatggacgtggtgcgccaggcgcgcttctcctcggcgttcacgttcatctactcgccacgccccggcacgccggccgccgcaatggaacagattccgcgcgacgtggtgcaggaccggttcgaccgtctggtggcgttgcaggagcagatcaccgaagagaacctcgccacattcgagggccgcgacgtcgaagtgatgatcaccggcaaactcggcaagaaggacaccgacacccaccgtgtcaccggccgcgagaaaaccggcgtgctggtgcacatcggcgtgcctgaaggcgaaccggtacctgaaatcggcgatttcgtcacggtcaccgtcacacacgccggccgccataatctgcttgccgaccccgatgtggccgctggacagacctattccgtgcggcactgagggggcgtatatgacgcaacgagtcgtctccatcgtcggtcccaccgcgtcaggcaagacggggttgggcatcgccatcgcccggcgtctggccgaagcgggggagcgggccgaaatcgtgaacgcggacgcctaccagatgtaccgtggcatggatatcggcaccgccaaacccaccgccgaagaacaggcggtcgtgccgcatcatctcatcgacatcatcgaccccgaagacacgatgagcgtggcccgattccagcagcttgcgcgcgagaccatcgccgacctgcaatcacgtggcatccggccgattctcgtcggcggctccggcttgtacgccagagcggccatcgatgacatcacctttcccggcaccgatcccgacgtgcgcacacgtcttgaggaacgcgagaaaaccgagggtgccggtgctttgttcgacgagctgcgggccaaagaccccgaagccgccgcgcgcatggacccacgcaacccacgccgcaccatccgtgcgctggaagtcatcgagcttaccggcaaaccgtattcggccagcctgccgcgctaccggtacgtgattccgtccgtacagatcggactcgacctggaccgcccggatttggaccatcgcatcgacctgcgcaccaagcagatgtatgacgatggattcatcgaagaagtcgaacggctgcgcccgcatctgggtgccaccgccgtacgcgcgctcggctatcagcagatcatcgacctgctggacggtatctgggatgtgaacgacgccttcgcggacatcgcacagaaaaccaagcgactcgcccgcaaacagatgggatggttcggccgtgacccgcgcatccactggctgcaggccctgaacccgaaactggtcgacaacgcgatggccattatcgcgcacgccgacgccggcgactacgacccgatcgacgcccgagccgacgaatacacccagcatcatctgggcgatatcacggcgtaggaatcagccaaaggccggtgcaatcacccgcaatcagtgtgcaggcccctgattccagccggcgatcaagaacacgcgcgtcggattcgccgggcgtagtatcgcgtcgaacatcgtctccagtgcagacgtgtcgccccgatatgccgagtgcttggcggcgcgatactcttcgcgcgtcactgagccccagtcgagatcccagccggcgtcatgcgccaagcgtgaaccgaatatacgcagcaccatcgcattgccgccacggaacggatgcagataaccgagctcatcataaatagaagcgaacgcgtgaacgaacacgtcgcgatccaacgcatgcaggttgcgcttgtccgccaactccatcgcgatgttgtgcgcgccggtctcaatgagcccagccgggaagaacgcctccggattcgcggcccgagcccggtcgttcgtcacctcgcgtgtggtgtttgaggtacgcaacttgcccgcatcctcgaacacgccttcgaacagccccttatgaatggcggtcaactcgtccaagtcgccagacggattccaccgacgttccgccaacaatacggtacgtgcgaacaccgcatccgcgcgatccgtggcatgatcatccagactgccggcagccagacgatcctttccggcagggtcggcggcggcgcgcagacgcatggcggtctgctcgtccgccacgtcgatgagatgggtcacgggcttcaagccacgttcgtaggcaaccgcggctcgcatcgttgcctcgcccggcgtcatcgcttccagtgcgcagttcttgagtgcaaatgcgactgcgctcgcacgctctgcgggtgtcatgcaacccatgataaggcatattcgcgctccagcggggaatcgactcggacgaacctcgacgaaccgcggcgaatcggctgtcgggattcgtcaatcgaccatatcgtcacggtgtcgtcaccaaccatgcacccccgtactagtagaatcagacccgatatggcacgaacagcatcctccaacagcaccaaaccccgtaaatccaaagacaacgggtctacccatgatggcgaaaccaaggtccagcccgagcttgacctcgaacctgagccgttgtggaagaagatcctgctcgcgattccgcgcgcgttcggctccggcgtacgcgccgtcaccggcgtcggcgaatacgacccagcctaccgtcgtgacggtttgtgtttcctgctgctcgtgctcgccgtactgttctgcgcgtccgaatggttccgtgtcagcggtccattcggccagctgcttcacgccatcgcggccggtgtgcttggtctgatgagcgtcgtgctgccggtgttgctcgccgccgtggccttccgactcatgcgcaattccggtaaagggtccaataacccgcgtgtggtcaccggttgggtgctgctcatgtggtcgatttgttcgatcatcgacgtggcgatcgccgccgaccacaccggattcgacatcacgattctgcaatccgccggcggcctgttcggcttcttcctcggctcaccgctcgcctggggcctttccaacgtgttcgccatcatcattttcgtggtcgtcggcctgttctccttgctgatgattaccggcacccacgtcaccgatttgccggaggatgcgcgcaaaatcgcagctaaaatccaacgcaaaccgtatgtgccgatgggccaggaggccgacggaagcgccagccagttccccaacgaggtccgtgtgggagataccacactcgcctttgccgacggtgttccctcgcatgacggcaacgacgacggcaacgacaacgatcaggccggcgatgcacggcccagcctgttcgcacgactgttcggccgcaaatccaagaccgaagacgacaaaacccttgacaagtatgctgccgacgatccgttcgaccgtgccgccagccagcatggtgccaccgccgaaaccccggtggtcgatccgatgaccggcgagattaccggtgcgcgaaccattgcatcgtcttcgtacgacggtcgtccgcacctatccagccctgcgcctgctgccgatgcggatgatggcgacgcttcccgaacccgcgtcatcaccagtggccagaccatcgccatgcccggtgggggagcggtagacgatccgtgggcacccagtgccgcccaggccggtactgtcgcgctcgcaggggcagccggggcgatgggagcggccggggccgccggtgccgcggccgcggcagccgcgaccggagcctacgcaggcgccgatgcggatggcagcggagtcggccagggcgtgcccaatacggacggacagccgaatgccgccgccggcaacggtacagacgacgacgccaataggccgtatcagttgcccgacctgaacctgctgaccaaaggtcagccccatgcgatgcgcaccccggccaacgatcgcgtgatccgggcactgacttccaccttcgaacagttcaacgtggacgccaaagtcgtcggcttcctgcgtggcccttcggtcacccaatatgaggtcgagcttggccccggcgtcaaggtggagaaagtcaccaacctgcagcgcaacatcgcctacgcggtggccagttcggatgtgcgcatcctttcaccgattcccggcaagtccgctatcggcatcgaaatcccgaacgaggatcgcgaaatcgtgcacttgggcgacgtattgcgctccgacaaggccgtgggcgacccgaacccgatgctctccggcatcggcaaggacgtcgaaggccacttcgtgaccgctgacctgaccaagatgccgcacctgctggtggcaggtgccaccggttccggtaagtcgagttttatcaactcgatgctcacttcgatcatcatgcgtgccacgcccgaacaggtgcgtctgatcatggtggatcccaagcgcgtggaactgtccgcctacgcaggcatcccgcacctgctgaccccgatcatcaccgatccgaagaaggccgcacaggccctcgaatgggtggtcaaggagatggatgcacgctactccgacctcgaattcttcggattccgccacgtcaaggacttcaacgaggccgtgcgcgccggcaaggtacatgcgcccgccggctcccagcgcaaggtggccccctatccgtacatcctcgtggtggtcgacgagatggccgaccttatgatggtggccaagaacgatgtggaaagctccatccagcgcatcacccagctggcacgagccgccggtgtgcatctggtgctcgccacccagcgtccgtccgtggacgtggtcaccggtctgatcaaggccaacattccatcccgactggcgttcgccacctcgtccgccaccgattcgcgagtcattctcgacacggtcggtgccgagaccctgattggccagggcgatgcgttgttcctgccgatgggttccgccaagccgattcgtgtgcagggctcgtgggtgtccgaatccgagattcgcaaggccgtggagttcgtgcgcacccagcgcaagccgaagtaccgcgaagacatcgaacagatggccaaggaagccgaaaagaaagacagcatggagcccgacgaggagatcggcgacgacatggacgtgctgctgcaggccgccgaactcgtggtcaccagccaattcggctccacctccatgctgcagcgcaagctcagggtcggcttcgccaaggccggccgactcatggacttgctcgaatcgcgcggcgtggtcgggccgtccgaaggctcgaaggcccgcgaggtgcttgttcagccgcaggacctgccgcaggtgctcgccttcatccgaggcgaaaccagctcgctcgaagccagcgccccgcaacaacccgaactcggcgaataattcacccatcgacctccctctgatgagggaggtgcccgaaggggcggagggagagaagcgcggacagcatcagcacgaaacctgattcccgaataatagcagtcaatatccagccaccactcactcaaggtaggagtatgggggtaacgtgaacactatggatgagaacacaatggacaagcagtcatcgcccaaatcatcgctgttagacggatggaacgcgccgccgaacctggtcacctactcgcgcatcgtactcgtggtgattttcctgacactcgacattctcgccggttcctggggtgaggacaacctgatcatgcgttgggtcgccgcggtactgttcatcatcgccgcgtccaccgataaaatcgacggttggatggcccgcaaatacaatcaggtcaccgaaatgggcaagctcatggatccgattgcggacaagctgctcacttgcggcgcaatgattgtatgctccgcgttcggcgagctcggctggtgggtgaccatcctgttcctgattcgcgaaatcggcatcaccgttatgcgcttcttcgtcatggagcgtccgggcggcaaggtcatcgccgccgcatggcccggcaagctcaagaccgtattccagtgcgtgggtctgtccatgctgctgctgccgttctggtcattgggtaacggacaggccacgccgttctggatgaccgcttactacttcctgacctacgccatcatctacgtggcattggtcctgtgcctctactcgggtgccgtgtacctgtacaacacgttcgtcgccccgaagcggaagtgacggatattccaatgcaggaattgtgcgacagtctcgcggccggcatcctcaagatctgcgaggcgaacaatacgaaaatctcctgcgctgaatccctgaccggtggcctgctcgccgatgcgttcgtgcgtattcccggtgcctccaacgtgttgctgggctccgctgtcacctacgacatcaatgccaaggcttcgatcctacacgtggacaaggccctattggatcgagaaggcgccgtacaccccgaagtcgcccggcagatggccatcggtgccgctcgcctatacagccagccggaatacggcgaccgaatcatcggcctttccaccaccggcgtggccggccccggtccggacggtgataagccggccggactggtgtatgtgggcctgcgcatccccgcaagcctcaccgcggaccatgtcgaagtgctcaaagccgtcgaactccatcttgatggcatgcgcgaagaggttcgtcgcctcaccgtattccacgttctgcaaaacttgagtctattcacagcaagttttaaggaataaaaccgcgggaccgtcgtgttgtacatagtggaaacactgaaccgaccttggaaggggcgatggcgatggaaacgatgacccgagtgaacgaacagatggatgtggccgccaagaagccgatggctgtgcagccgggtgtcgcccgtatgcgtgaactgactccggcccagcgccgtgcggtgatgttcgcccagcagcaggtgctcaaggcgcaggctgccaagaaggccaaggatcagcgtcaagccgttcgtgaacgtatgtgggatgaggattcgccgtcgtacaagccgactgccgccgccgagcccgtggtggttgaggaggagcctcgcgaggtttcgctgcgtggtgctatcggctacgtgctgcgcgaactgcgtacgcgcgatcgccgcacgttgcgtgaggtctccgagaaggcgggcgtttcgctgggctatctttccgaagtcgaacgtgggcagaaggaagccagctccgaactgctgagctccatcgccgatgcgctcggagtctccacttcgcgcatgctgcgcatggtggccgattatctcgacacagtcgagggctgatcggttggcggtgtgaagccgcatcccgtaatctatgtctagctgtgaacccgtatcgcttgtggcgatgcgggtttttgctgtcctgcgggtggtggcacactggcgtgtatgcgtgaacgggaattctgggaattacttgaagaggtgttcggtcggacctacggtcgttcgctgtcgcgtgatcaacggatgtccaaattggcgaatatgaccgtggtcgaggcgctggacgcgggggaggagccacgcgtggtctggaatgtgctctgtgaccaaatggaggttccggactccaagcgttggggccacgatcataacgcgccgcccatgcccgccgtctgacactgcgggattacggagtcgctgaatcgtgaaattggcgatttcggcgtgttgcacgccaaattcgaacaaatgttcgtgtgtgtggttatagttattcacagtgacaagaagccgcatacgtgtgcacagggtgcttgtcatccgccataagccttaccgcagtaggtcttagggaggtcagatggccgagctcgggcaagctggaaccacaatggttggtttggattgcctcacatggcatgtccgtcatacggtggaggcatccgattcgcgcacgacttcgacaaggagaagatcatggcacttgagaccaagccggccaaggacccggcagccgaggacaagcacgagctcgatcccaagcgcaaggcggcgctggacaccgcgctggcgcaggttgagaagagctttggcaaaggttccgcaatgcgactgggcgaccagcccgagcagaacgtcgaggtgattcccaccggttcgttggccctcgatatggcgctcggcatcggcggcctgcccaagggccgcatcgtggagatctacggccccgaatcatccggtaagaccacgctcgcattgcatgtggtggccaatgcccagaagaagggcggcgtggcggcctacatcgatgccgaacacgcactcgacccggcctacgcccgcaagctcggcgtggacaccgactcactcatcgtctcccagccggataacggcgagcaggccctcgaaatcgccgacatgctgattcgctccggtgcacttgacgtcatcgtcatcgactcggtcgccgccctagtgccgaaggccgaaatcgaaggcgaaatgggagacagccatgttggtttgcaggcccgactcatgagtcaggcgctgcgcaagatgaccggcgcgttggctcaggccggcaccaccgccatcttcatcaaccagctgcgtgaaaagatcggcgtgttcttcggcaatcccgaaaccaccaccggcggcaaggccctgaagttctatgcctccgtgcgtctcgacattcgtcgtattcaaaccctgaagaatggcgacgaagcggtgggcaaccgcacgcgcgtcaaggtggtcaagaacaagatggccccgcctttcaagtccgccgaattcgacatgctctacggtgaaggcatttcccgtgagggctcggtaatcgacatggctcagcaggttggcgtggtcaagaagtccggttcgtggttcacctatgagggtgatcagctcggtcagggacgcgagaaggttcgtcagttccttaaggacaacccggccatcaccgaggagattgagaataaggtcaaggccgagttcggtctgatcggttccgccgaccagttcgcggaagatggcgaagccgcagcagcggccgctgtcagcgaggccgccgctgccgacgtggccaaggacagcaaggccgcagcggcgcctgctgccaaaacgacccgtgccaaggccggcgcagctaaggcctgaacatgattagtgccgaagcattcttgcggcgcaatcctgttgcgtcgcaagacatgcccattgccgagcagcgtgttcagtcgaaaccgccgggacgtttttctcgacgggggagagacgctgccgttgtcgaagatcccaatgatttggacgcttgccgcgaggctgcattgcgtttgctggacgcggccccacgtgcatccggcgcgttgcgcgaacgattgctcagcaaaggctatggcgaggcgattgtggacgaggtcatcgaacggctgattcgcgtgcaactgattgacgaccgcgcttatgccgaatcggccgtacgctattgtgccggtcgcatgatgggtcgtcgtggtgcggtcctggaacttgctcgcaaaggcgtggaccgcaaactggctgaacaggtgtgtggcgaagctgagcaaaatggcatctttgaagatgccgcatgggaattgggccgccaaatagcccgcaaaacccatggcctcgatcgtcaggtccgtcagcgtcggttttggtccgcaggcggccgcaaaggacacagccccgaaaccctccgccgagtcgccgccgaattgttggtgtagccaagaaaaaatgagacctcttataccccgggttctgtcgtgccgtgcgcgaacgcacggcacggatggccatccatctcgacctgacgttgccgccaggctctagcagcctacccgatgacacgggcgagcagcccttaccgccatctgcttggccttgctcccgatgaggcttgccatgcgacctactgttaccagaggcccggtggtctcttacaccgccgtttcacccttacccgtcgaggacgggcggtctgttctctgttgcgctatctctcaggtcaccctgggcggacgttatccgccatcgtgctctatggagcccggaagttcctcagccgatcccaatgaagatcacggccgcggccatcaagaggtctcaagcctgcaattatacataaggtgcggaaaaggcggcatcccgccctgcggtgaggccatgacgttgcccagttatcctgttttctccatagttgggcatagttgggcgattcgtgaacgacgcgccgaatatcggatggggcgtgtcgggcgtgttgtggcgtgtcgtatggagacgaatcaaatctgtaagagcttggtatgtgcgagaaagagcaagaaaacgctgcctatccattgcagtatttaccatgacgaacaaacgagccagcctgataaaccggtatcaaatcttcttataggagactgctgccaaaaccccagtatatacatcgtttcattgcagagaaaagcccgggaataaacatatattctctgggcgagtttccggccgttcacccattgttcgtctacaatgaaacatacccggtcggtgatgatgccgttcggaacacatatagcgggttacaccgcttgagttagaggaggtcaacatggaaatcgtcgttaccggacgccacacgcaggtcaagcaaaggttccgtgatgtggtcgagaccaagatgaatcgtgtgaccgctatcgccccagatgctcagcgcgcgcagatcgtgctgacccatgagggcaacccgcgtcaggccgataccgccaagcgcgtggaaatcaccgttatcgccggacgtaccgtggtgcgtgcggaggcttccagcaccgatgaattcagtgcgctggacatggcgctggataagttgacgctgcgtctgcgtcgtactcgtgaccgtcgcaaggatcaccgtcgtggttacgcaaacccggtcccggtggatctgggtgttatcgccccggagcccgagccggaggtgtcggaggaagagccgaacaacagcccgcaggctgcggtcgcctccgatcttggccctggcgaatccgtggaggtccaggttggggatacgccgattgtcatccgtcgcaagctgcacatcgccgagcctatgagcatcgacgaggcgctgtacgagatggaactgatcggacacgatttcttcctgttcgtgaacaaggagaccggacgcccgtccgtcgtctatcaccgtcacggttggagctacggcgtgttcgaaatcgacactccggagaatgtcaagaaagcctgagggtaagggctgctgacacgatcagctgataccgcatggaccgcttccaatatggaagcggtccattttttcataaaaaggtcgaaaaattcgattgctgacggtgcgaggcgctattctggtacgcggacaccaccacttatcagtcaagggagaacccagtggtcgatattgttgacaaagccctgcgaatgggtgaaggccaccagctcaagaagctggagaacgtggctaaggccgtgaacgccctggaggacgagatttccgccctctccgacgaggacctgaaggcccaaaccccgaagttcaagcaggaaatcgaaaacggcaagagtctggacgagatcatgcccgaggcgttcgccaccgtgcgcgaggtctccaagcgcaccctcggccagcgtcacttcgacgtgcagctcatgggcggtgccgccctgcactggggcaacatcgccgaaatgaagaccggtgaaggcaagaccctggtcgccaccctgcctacctacctgaacgctctcgaaggcaagggcgtgcacgtggtcaccgtcaacgactacctcgccagctaccagagcgagctgatgggccgtatctaccgcttcctcggcatgaacgtcggctgcatcatcaccgagcagaagccgccggagcgccgcaagcagtacaacgccgacatcacctacggcaccaacaacgagttcggcttcgactacctgcgtgacaacatggcctgggagaaggccgacctcgtgcaacgcggccaccactacgccatcgtcgatgaggtcgactccatcctcattgatgaggcccgtaccccgcttatcatctccggcccggccgaaggcgacgtgacccgctggtaccgtcagttcgccaagctggtgctgaagctcacccgcgacgaggactacgacgtcgacgagaagaagaaggtcgtcggcatcctggacccgggcatcaccaaggtcgaggacttcctcggcatcgacaacctgtacgagccggccaacaccgccctgatcggctacctcaacaacgccatcaaggccaaggaactgttcctgcgtgacaaggactacgtcgtcacccagggcgaggtgctcatcgtcgacgagcacaccggtcgtatcctgccgggtcgccgctacaacgagggcctgcatcaggccatcgaagccaaggaaggcgtggaggtcaaggccgagaaccagaccttcgccaccatcaccctgcagaactacttccgtatgtacgacaagctcgcgggcatgaccggtacggccgaaaccgaggccgccgagttc

SEQ ID NO: 2964 - DNA, 17953 bp, Unknown
  R19_24m  MAG No. k141_7883
actcgcgagagtctcctatgagccggacggtcacggtaccaacagacgcgtaatttctattttcggcgcattagacggcaacggcatgcatgcgaattcgccatacccggattatgggttcgggccgcgcacacgtgtgcaacgcggagacagattcaccgacccattgggaagatggcttctctatggatcaccacgggataccgcttcagtagccaaatccatacggcgccaaggattcgaacttaacagagcaacccccatcggcatcacacaaatcaccaaacaattcttctccaattccatcgcccaagtcatattcgccggacttgctgtagtatttgtgtccggcgcgctttccgtgtcgacagcttcacgcgtttgcgcgatacaagccttgcatggcatgagaacaaccggcattattatgaggcaattcctgcggcatgcgttctttttcatcatctgcgtctgcatcggatggatgacttggatttccattggtgcgatcttctggcctttcgcttctcccttaggattcgccggtcagatattcctctccatcatcatcgccacaacgtgcatggcattggttgccttgtcattgtcgattgctctagtaagggttctggtgccgaacgcactcaaattaatccaaggaaagcgccctttacgttttctcatggcttccggctgcatcatggcaatcatcgttctcgctctcagctctgccagtttgaacgttacgaacttcaaatggcggcaatcccaaacactgaaaacaacattggagcatcaattgtcatccaacgacggattccaattgcaactgtggtatagcagcgatcaaaaccgagctcgttccatgccctcatggaacgacttcgtcgaacaaacttcccaatcagaacatacgcgattcgcctcattccgggtaggatgcacgtgggtggatagctcgcaagacccacagccctgcatcctcatggattcccgtacggcaaggctccatcatcttatacgaaacaacacgacacttgcacgaatcagtgtgattatgcccgagaatgaacaatggaacagcgaatccattacgaacaatgtgcttcgcgcatactcattcgagcaaagtttggcggcagaagagggaaagagtctgcccgccatcaatcgcacgagcatctccattgaatccagaccaagagatgctgtcttatcagcatttgacaccccttccaacaccgatggcctttcctctgttcctgttgttgtcattgacccgtcactgctctctggcgataccactacatcgatggtgtccaccggcggcatgaccttcgattacagctcccgccatcagctgctcgaaatcctacgggaaaagggcgtggactctttggtggcttcggtcgtcaatcggcacgacgagatacaaactcgtttggcacgaacaactcaggaaatgaactatttttccatcacagcttgcatatccataacatgtctgctgggcggcgcaatcatggtggctttgacactatgcacactccgacgtcaaattatgttcgtggaatatatgcatggagcgccgtcatatctccgttttcaatcgatactgttcctagcagcggcgttatgcagtgcatctcttccgatccagttgctcataggaggttacaacgccgtttccacgacctcggtttccttactattcatcgtcgtttctctggcaaccacagtgctttacgattcgcggctgcgcgccgacagtatcaaacatccctgatcgccatccacaaacctgtatcagcaaccgcttaccacgtaaggaacatcaagcatgagcgccttattgatcacgcataatctgacatatcgaatcgacgaccgcaccttatgggaaggactgaacctgacattcagtcccggtgacatggttgccctgaccggagaaagcggatgtggcaaaaccactttgttgaatgtcctaggtcttttggaagagccaagttcaggaacaattacctatgatgggcaaacaattgcctccagaaagggccgacggctcatgcaccgcaacgtcatgggattcatgttccagaattacgccctggtggagcaatggacggtgaacagaaatctgattctggctctgcgcagcgtcggaataccatcggcagatagaagtcggctcatcagacgcgcattgcgggccgtgaatctgacgggctacggcaatagaccgatctacacactcagtggaggcgaacaacaacgagtcgcaatcgcgaggcttctcatccgtcaatcgctgcgcgtcatactggcggacgagccaacagcggccctcgatgccgacaaccgcgccatggtcatgcgtcacctgcgtgatttcgccgacaacggagcgatcgtgatctacacgacgcacaacgaggagaccgcggctctcgccgaccgcatcatcgcattatgattccgccagccactgttcgtacagcgcatcgacggcttcgagcattcgacccatcggctgcgtggaatcgatcaccgcgtcggctatgacacggcgttgttccgggctggactggtggcgaatgcgcgcaagcgcatcatctcgcgtcatgccgcgggtcgacaccattctgtcgacccgtgcttgttcgggcgcttcgacggtgacgatatggtcgaatcgcatgggcatggcgtccaggacttccgccaacagcggaacatcatgcacgaccatggcatctggattgtccgcgaccgcctgccgctcccgagacagcgcaagatcatagatcaacggatgctcgatatcgtccagtttcctccgcaaccgttccgagtcgggcccggcgaacacgtgctcggcgatccatcgccggttgagccgcccctgatcggtcagcgcgtcggggccgaaacattccgctatacgacgaagaccgacgccgcccggttccaccactcggcgcgcgagctcgtcatagtcgataagcgccgcgccgagctcccgcagtcttgcggacaccgtgcttttgcccgccgcaataccaccggtcaatcctattcgaatcatgctccccccatcatgccatgttccgaggttcatgcacacaacggcaaaacccggcccgccgaagcgagaccgggttttgactatacgtcaggcgtcagtcgcccgatggcgaactcacttgccgagcagctggtcgcgcagggcggcgagctgatcggagtcggcgagggtaccggtagccggagcagcggaagagtagttggaggtctcctcgaccggcttctcttccttcgggccctggccgtcggcggctgcggattcggcagcgttctccagctccttggccacgaactccttgtgctcctcccacagctcgtgggcggcggcgtactgggactcccactcctcgcgctgcttctcgtaaccagcgatccactcgttggtgttcgggtcgaagccttcggggtacttgtagttgccctgctcgtcgtactcggccggcatgccgtagatggccggatcgaagtcctcggaagccgggtcgacggagtcgttggcctgcttgagggacagggagatacggcgacgatcgaggtcgacgtcgatcaccttgacgaacacggcctcgcccggcttgaccacggtctccgggttctcgacgtgacggttggcgagctcggagatgtgcaccaggccctcgatgccgtcctcgacggagatgaagacaccgaactggacgatcttggtgaccttgcccttgacgatctggccgggaacgtgggtgcgagcgaagcgctgccacggatcctcctgagtcgccttcagggacagggagatacgctcacggtcgagatcgacgtcgagcacctcgacggtgaccttgtcgccgaccttgacgacctcagacgggtggtcgatgtgcttccaagacagctcggaaacgtggatcaggccgtcaacaccgcccagatcgacgaaagcgccgaagttgacgatggaggacaccacgccctcacgaatctggcccttcttgagctgggacaggaaggtctcgcggacctcggactgggtctcctcgaggtactggcggcgggacaggaccacgttgttgcggttcttgtcgagctcaaggatcttggccttgatcttctggccgatgtacggggagaggtcgcggacgcgacgcatctcgacgagggaggcaggcaggaagccacgcagaccgatgtcgacgatgaggccgcccttgacggcttcgatgacggtgccctcaacgacgccgtcagcttccttgatcttctcgatgtcgccccaggcgcgctcgtactgggcacgcttcttggacagaatcagacggccttccttgtcttccttggtgacgacaagggcctcgatggcgtcgccgacctcgacgacttcgtcaggatcaacgtccttcttgatggaaagctcgcgggaggggatgacgccctcggtcttgtagccgatgtccaggaggacttcgtcgtgatcgatcttgacgacggtgccctcaaccagatcaccatcatcgaagttcttgatggtggaatcgactgccttgatgaagtcctcttcggtgccgatgtcgttgatggcaaccttggcgacttcagtgttgttctctgccatgtaaatatatggtttctaatagtggatggataatttctcgatattcagttatacgcacacccttacaggcatacagatattcacaatacaagcaactctgcccaaatttcctaggaaactctaggcgtgtcgttcggccatttccacgacgttggccaggagcatggctcgggtcatggggcccacgcctccggggttgggggtgtaggcggaggccttgtcgtagcaggccttgtccacgtcgcccttgatgcggtagcgaccggcttcttcgtcgtagacgcggctgacgcccacgtcgaccagcacggcgccgtccttgatcttgtcgggcgtcacgaatccggccgaacccattgcggcgacgatcacgtcggcgcggcgcatgtggtcggccacatcccgggtaccggtgtggcacaaggtgacggtggcgttgacggcgttgcgcgtgagcatcaggccaatcgtgcggccaatggtgatgccgcggccaagcacgcacacttccttgccgttcaaatcaatgtcataggcgtcgagcagctcgagcacaccgcgcggagtgcaaggcagcggtgtcgaaatgtcgccgcgcacatgcagcaccagttcgccgaggttgtacgggtgcatgccgtcggcatccttggccgggtcgatcatgtcgatgatcgcgttctcgttgatgcccttgggcaacggcaactggacgatgaacccggtgcaggccggatcttcgtcgagttcgcgtacggcagcggcgatgtcgtcgaagctggcgtccgccggcagttccttcttgactgaggtaatgcccacttcctggcaatcggcgtgcttgccggccacgtacttcatcgacccgggatccgaccccaccagcaacgtgccaagccccggctggatgccccgggccttgagcctgctcacccgttcggcaaggtcggtcttgatcccggccgcaatccgcttaccgtcgattattgtggacatcaacgccctcccctgtggtttcgatgctttctatcgaaacgataggctatcgttggaacaagtcaggattatatatcgttcgctctcacgaagaaggcgtgccatggggactcaaatcacacgacttacgcgactcgccgcagccggcctgagcgccgttctgttgttcgcgaccgccgcatgcgcaaccttctcccccgatgaaaccgagccggacaacaagaccagcgttcccgcaccgaccgggccgatcaatgtggtcgcctccctcaatcaatggggctcgctggccgccgagctgggcggcgatgacgtggaagtcacgtccatcgtgaactccaccaatgtggatgcccacgatttcgagccaaagacctcggacgtcgccaagctgtccaaggcccagatcatcgtggccaacggcgcgggttacgattcctgggccaccaaatcgatgaccaagaccacgaatatcgtatccgccgcttccgtcatgggtgccatggaaggcgataacccgcatctgtggttctccaaagacgctcgatccagcatggccacggccatcaccgatgcatatataaaggcactccccagcaagaagaaggccttccagaagcggctcaaggcatggcaggcggatgagaaatcgctggaaacatgggcgtccgagttcaccagatcccactccgacctcacctatgcagccaccgaacccgtggtctattatctgatggccgatctcgggttcaagaatcagacgcccaagggatatacgcaatcgaccacttccggcggcgaaccggcacccgcggacctgcagtctttccagaaactcatcgaagacaagggcgtggatgtgctggtcaacaacacgcaggaagccagtgacgcgaccaatatgatcactggcgctgccggtcgtgccgatgtgccggtagtcgacgtctccgaacaaatgcccaaggacgccgacacgctgaacgcctggatcaaccagctcatcaacaccatcatcgacgcggtggatccgagctatgactgcgaagacgccacggacggcaacgcgaattccgatgattccagcgccgacggcgccgccacggatgatgccaatgcgcaagattccaaggccagcaccggttccagcacggagcccaagtacatccgtcagtgcaaggcggccacatccagtgattcgtctcagtattcggcaaaggccgatgcctccaatggcgattccggcgatgcctccggcaacgaccagaccgactccggcaaatagttagaagcaaaggacagcggcatcggattcatgcaatgccgatagacgccttgcacgagaagggttgtgcgaccattgtcgagatggccgcacaacccttttctttggttgtcaccatccgtacacgatattgagaacgattgtcagcatcgtttgccacaatcgggcgttatgagtgaaacttccgattgcatcgtgttcagcgatgccgccatcaagcgtggtgaccatatcatctggcagcatggcacctttgccattcccaccggttcggtcacggccatcgtcggcaccaacggcaccggcaaaaccacgatgatgagggccgagctgggacttttgccgctttgccatggcagcctgaccgtactgggcaagcctgcgggcgagatgaacaaacgcatcggatatgtgccgcagagctatgtggcgaatgtcgattccaatctcaccgccgaacaatccgtgttgctgggcctgaccggcacccgattcggcatccaccccatcaccaaggcccagaaagccaaagcgctcgaggcgatggagttcaccggcatcgccgacaaggcgcagtaccgtctgtccgaactgtccggcggtttgcgccagcgtgtggccatcgcccaggcgttggtgtgcgatccacaactgctgatgcttgacgagccgttggccaacctcgatctggccagtcaacgcgccaccgtacacgtgctggccaagctgaaccgtgaactgaacatgaccatccaagtggttgcgcacgatctcaatatgctcttgccgattctgaccggtgccgtctacttgctcgacgggcacccgcactacgccgatatgcacaaagtgctcgactccgacctactcacccacctctacggcacacaggtgcaggtggtcaccactccgcagggtgacatgttcgtgaccccgacgccggatgagccccaggaccagccgcaggatatgcacacggcagccgaagtggcgcaattgcaccatcacgagcacggcaacgccaccaatggcagtgccgccaacagcgccgagaatcgataacatcaagctagccgatccacagcccgtcaacgggctgcagctcaggcatggagaaaatacagggacatgagcaccatcaacttttcgtatgatcccgaatggctggacacactgtccgctccattcatgaccaacgccttcatcgccggcctgtgcattgccctggccgccggtgtcatgggatacttcaccatcgcccgtcgttccaccttcgcggcccatgcgctggcccatatcggtctgccgggcgcgaccggcgcggtgttgctcggcctgcccgtatcactgggcatgggcgtgttcgcactgggcggcgcactggtgatcggtgctttgggcaagcgcgtttccgagcgtgaaatcgcaaccggcaccgtactggccttcgccaccggcttgggtctgttcttcgcgcgattgtcgagttccgcctcccagcagatgcagtcgatcctcttcggctcgatcctgaccatcaccaccggccagatcatcggcttcgccgtgttcgacgtattgctgctggcattgttggccatcatctaccgcccgctgctgttcagctcgttggatgagcaggtggcacaggccaagggtgtgccgatcgggctgatgaacgtggcgtttatggcgattatggccggtgtaatcaccattgccgtgccggcagtgggtaccttgctgattttcgcgctggtgatcacgcctgcggccaccgccaatattctggccggctccccattcaaggcgatggtgatcgccagcgtgctgtgcctggtgtcgatttgggccggactcgtgctgtcggcgatgttccccgcccccccgagcttcattatcgtgacgctttccaccctgttctgggctatcgccaaggccgtggagacagtgcggaagtaatctcattcatttttcttgcccccgctggcaaattcatagcgggggctttgttatatcttctccaccaaggcattggcgatggcggcgatgccttcgccgcggccagtgaatcccatatggtcggtggtggtggcggtaaccgataccgggcaaccaaccgccgcagacagggcggcttcggcttcagcacggcgtgtgccgattttcgggcggttgccgatgatcgccaccgaggccgatgccggcgtatacccgttggatgccagatgcgccacaacttcttgcagcatatcgatgccatgccttccggcaccatgcgcgtccgcaccgacaccgaacagtgaaccaatgtctcccaatcgggcggcggcaagcaacgcgtcaatcagggcgtgcgcggccacatcgccatcggaatcgccttcgataccctcgtatttggcggcatcggcctcgctgcatgaatcagacgccggccagtaaagcccggcaatccacagttcacggcctgagccggcaggcgcaaaacggtgagcgtcaaaaccctgccctatcaacactcctgcagaccccatgcagtccccttcgatggcgctacccagacgaacggcagcaaacgattatgaatcacgaagccccggcgtatcgcataaggacacgaccggggcctcaacaatcaaatcacttcttcttggacttcttctcggcttcgacacgagccaaagtatcggccgcggcctcttcgggctcggcggtgtgatgcttgtcgtcaccgggttgagcgggctcgtagcccaggttcacgtcgagcagacgctgggcttccgcctcgtcgatcttctcggacaaggcgatctcagaagtcagaatggcgcgggccttggtgagcatacgcttctcgcctgcggacaggccgtgctcgtcgacatctcgctgggcgagatcgcgaaccacttcggcgatcttgttgacgtcaccggtggcgatcttttcgacgttcagcttgtaacggcgagaccagttcatctctttctcgatgatcggggtccgcaggatgccgaacaccttggccacttcggatgcggagacgatgtcacgcacgccgaccttcctggcattgtccacgggaacgttgatgaccaaaccatcggaagagagtacggacagctgcagatattcgcgcgtcactcccttgaccgtccgctcggtaatggcctccaccttcgctgcaccatgacgcggatagacgaccatatcgccgactttgtaagacatgtaccctccgagaactgacggcttacacacaaaaactcgaataattatgccatgcggcctggaccgcccctatgagagcgttcacaaccacgaagacacaccgaaaagggcaagaattcgccattttcgacgcgccaatgtagcgttttcgactccaacgcacgtagactttgggtcatggctaaagaaacgaagatcaaggaagataccgtcaccgtgcctgtcgcccaaggcgacctcgatgcggtgagcaatgctgaattctacaacccccacggagttctcggcgggcatctcggcatcggcaagcatgccgacaccgccacaatccgtgtgctgcgtccgcttgccaagtccgtgaccatcctcacccaggatggcgaatacccgatgacccacgaatacaacggcgtgttcgtggctaccgtgccggcctccggcaccaagaagcagcccacgattcccgactaccgcgtcaggaccgagtgggaaagcggcgcagtgctcattgaggacgacccataccgttatatgcccacagtcggcgacatggacacctatctgttcggcgagggccgtcacgagaagctctgggaggcgcttggcgcgcacgtgctgcgctatgacgatccgatgggcggcgcagacggcacgcccggcgagcaggtggtaggcaccgcgttctccgtgtgggccccgaacgcccatgccgtgcgcgtggtcggtaacttcaacgcctgggatggccgtcgtcatgccatgcgcgagctcggctcctccggcgtgtgggagatcttcatccccggcatcggcgcgggcgagacctacaagttccagatcctgaacgccaattacacgtgggagatgaaggctgacccgatggagcgtcagcacgaggttccgccgaacaccgcctccatcgtcaccgaatccacctacgagtggaacgatgacgcctggatgcagcaccgccgcaccaccaacccgcatgatggcccggtctccatctatgaggtgcacgccggcagctggaagcagggactgacctaccgcgacctggccaagcagctcgtggactatgtcaagcaggaaggcttcacccacgtggagttcatgccactggcacagcacccgttctccggctcctggggctatcaggtcaccggctactatgcggtggattcccgcctcggctcccccgacgacttccgttacctggtcgatcagttccatcaggccggcatcggcgtgatcatggactgggtgcccgcccacttcccgaaggatgccttcgcactcggccgcttcgacggcacccagctgtacgaggacccggacccgctgcgcggcgaacaccccgaatggggcacctatgtgttcaacttcggacgccgcgaagtacgcaacttcctggtggccaacgccctgttctggctcgaagacctgcatgtcgatgcgctgcgcgtggatgccgtcagctccatgctctacctcgactacagccgcgaacccggccattggcgtccgaacatctacggcggacgcgaaaacctggaggccatcgacttcctcaaggaagccaccgccaccgcgtacaagaacaaccccggcgtcatgatgatcgccgaggagtccaccgcatggccgggcatcaccgcccccacctccgccggcggcatcggcttcggtatgaagtggaacatgggatggatgcacgacaccctcgagtatctgcacgaggagcccatcaaccgcaagtggcaccacaacgaaatcaccttctccatggtgtacgcctactccgaacactacgtattgcccatcagccacgacgaagtcgtgtacggcaagggctccctgtacggcaagatgccgggcgatggctggcagaagctagccggcgtgcgttcgatgttcgcctatcagtgggctcacccgggcaagaagctctccttcatgggcaacgagctggcccagtggggcgagtgggatcacgacgcctccatcgattgggattgcctgaactggcaggagcaccgtcaggtccagaccatggtcgccgacctcaacgccttctacaaggcgcatccggcactatggagccaggacttcgatccggccggcttccagtggctgaccagcgacgatgccgaccacaacacgctgagcttcctgcgcatcggcaccaagggcgagaccttggccgtggtggtcaacttctccggtgaagcctggcccgattaccaggtggcgctgcccaccggcggcaagtggaccgaagtgttcaccaccgatgacgccaagtacggcggctccgacatccacaacggcaccttcgaagcggtcgagggcgaatatcattcgcgtccgttctcggcgaagatcaccgttccggctctgggagttgtattcttgaagccggaagactgaactggtcaacaggctgaaaggtaaccggtttatttatgctcaataccacagcgcgtcagaatacgacaccgcgcacggtgctggtggtcgaggacgagcccacactcgccacggccatcgcccagcgcatcaccgctgaaggatggaccgctcgcgtggccggggacggcgcttccgccgtccaggccgcgtcccagctacgccccgatctggtaatcatggacatcatgctgccggtcatggatggtcttgaggccaccaaacgcatcgtcgccgaacgtccggtgccggtgctgatcctcaccgcacgtgatgacgaggccgacaaggtcatcggtctgggagcgggcgccgatgattacatgaccaaaccgttctccatgcgcgagctcatcgcccgctgcaaggcgctgctacgccgcgtggagcgtgcgaaggtcatcgccaagaattcggagaacgagaagctgctcgacttcggttcgatggtcatagacccggcccagcgcatcgtcaccgtgaacggcgagcaggtgcatctgacccccaccgagttcgatctgctggccacgctggcccgccgcccgaagtcggtgctcacccgcgaaaagctgctcgaagaggtctgggactgggtcgacgcatccggcacccgcaccgtcgacagccatgtcaaggcgctgcgccataagctcggcgccgataccatccgcaccgtgcacggcgtaggctacgctttcgagccgccgaccgcgtgatggcatccaaaaaacaacagcaatcccggcttgatgcgatgaaacctcgcgtcaagccggttgatttgttctcctctctgaagctggaactcagcgtactgatcgttatcgccactgccatcgcgtttgccatgtgctggttcctcctgaaattcggctggtccggttggatcgccatgccgctgactttggtggtggccttgggcatcacctatttcttctcccgcggcatcaccgctcccttacgccagatgcgcgatgtggccgaagccatggcggatggcgattacacggtccgcgtggatatcgatcaggatcgtcatgacgaggtcggccagctggctcgctcgttcaacgagatggccggcgaactcgaacatgccgataaaatgcgccgcgacatgatcgccaatgtgagccatgagctgcgtacgcccgtttccgctttgcaggcgatggtcgagaacatggccgacggcgtcaccgagcccactcccgccaatctggagagcatcctcacccaaacgcagcgtctctccgacctcatcgccttcctgttggatttgagccgtatggaggccggtgcggcgagtctgaatatcgagaagttcaatttcgccgactttcttgacgagaccatcgagccgttggaaatcgccgatggcggccacgcccacgacatccatgtcaccgtgccggccgacatctcgatggaaggcgatcaggaccgcctgcgccagctgttcaccaacatcatcgccaacgcgctgaagcattcggccgacggcaccaccgtgctggtcgatgcccatgaggatgacagccaaggcaccatcgtgaccaatgtggtgaatttcggctcccagattgcaccgtccgaccgttcggatatcttccggcgctttgtcaaaggcaagacgggtcccggcaccgagtcgggcggcaccggccttggcctgtccatcgcacgttgggcggcccaattgcacggcggcaccgtcaaagtggtcgatgacacgcgaggcgccgatttcgaaatcatcctgcctaaatatcacgtcgccgaacgctgatattgtccgccgtcctaccgtatactgtattcgaacagatgttcgaatacagggtgggaggcacagcatgacacagcaatccaagtcacgaaccatgccgcacgacaccacgctgtttgtcatgcagatggccggcgattccatgatcaatgccggtattcataacggcgatctgctgattgtcgatcgttcgttggcaccagtccccggagatgtggttgcggctgtcatggatgacgaaatcgccatcaagcggctggtttcacgggccggcatcaccatattgcacgccgagaatcctcgatatcccgattacatgccgagcaacggcgcttcgcctgctatctggggcatcgtcaccgatgtcattcacccgttgatatcgtcatcggaccgtcgcgccacggcatccgccaataccagcacgcccaccactttagtaccggcctgctgaaatgcctgaacgcattgccgcacggtggcacctgtggtgacgatgtcatcaatgagaagcaccgcgtcgccatggcctatgagatcacgcttcaccctgacatgaccggtgatacgacgggcacgctgtgccgaagaggtctgctgcacggagcgtgccttggtggaggagctcagggcattgcatggtcgcgcatcgacgccgtacccacgcaatgcccctgccaccgatttggccaacggtgccgtatgggcacgccctcttcggcgcattgatgccagcgatgacggcaccggaaccaccaatacgcgatgccccaagcatgatgatggtattggcgtcttgttcagcagcgacaccatgatgcggccgaaagggccgtcaagctcggtatcgtcgtggtccttccagtcgagaatggcacgacgcgccgctccctggtaaatcgatgcggaccatatacgggctccgccaccaccgtctgtatcccgctcccggcattgtgcgaacaaggcccgacatgccgcacacaatacctcatccggcgcgtcacacccagcgcagccgcgtggaaacagcagattgcaggcctgtgcccacatcgcatgccaccacttgtatacgctcggcccgtccataacgcgtcaccatcaagctggagtatcgaatcgcgcaagcagtgcatccagcagttgtaccgtgtcttgcggattctccacacgaacaccgatcgcaccggcctcaaccgcaggatagtcattacccgtaggcgtcatgcgatcgcccacgaacaccatttcatcggcccgtatgccaagtgtctgcgtcagcttgcgcacggcataggccttatcgatgccgcattcgctgacatccacactggtgtagccgccggccctgacccgcatgtgcggcagatcggccttgaccgcttcgaccagcgcctgtttcttcgtgttatcgcgatcccatgcctgtttggccgctacgggtgcgaactgtcccagagcggagaaggtgatctggctgcccctgttctcgattcgaggcccccatacctgctgttcccacaatcccagttcccgggcatgtcgctcaagactttccgagacagcggccacggtggcttcggacagatcatgcgcatacaccaaggcccattgcgtgccatcccaccggtaataccgggagccggaggcaggcatgacatgcagattgccgcgcctggcattcggggtgagtacatccagcacctgtgaggtgaccaccgccatgccgccccctgagatcagggccaccaccgtatggtcgagcagcgcacagaaccgttcgatcatcgcgggcctcatcggctgttttgagctggccagcgtgttgtccaaatcgaaaccgaacaccttggcgttggagcagacattatcgaaatcaagttcggaccacgaacataccaccatttgtcgcgcctccctcgttgacgaatgttcacagccaatgaaccaatcctaacgcatgttgcctccgccatgtcctatggtgggaaccatgcttcagccaccttggaacgcacgaatctaccgcaaccgccacggtcgcggcacacgaaccccgatgttcggcacccgtctgccccgttaccgcactcgcaccggcatgttcgacgatatggtggcggcccaggttcgcaggctcggccaagcgtggccggaactgatacgtccgctccagttcgcggtggaggatgtgccaccttcggatccgacgccttggcagaccgagccgaatatgacgtcccagtgcttccccgccagccacggcattcccgcacgagtcgtgctctaccgtatgccgttgcagaccgaggcacctaccaagctcgaattgcagttggccgtcagggatgagctggtggcccgcatagcggaattgtatgggcgcaggcccgaggaaatcgaccccgattggggcctgtgacagtattgcgggggccgtgccacttcaagtaagacagtggcacggcccccgcagctatatcggcgccgaaacatcatcagaccgatgcttcggcgagcgcgctctacttgacgatggaggaatcgttccgagcccagacatggaccgtggcgggcatcagcgttgaagcgtcgatggcggacaatccggcgatgtccttgtcttgcaacgaatcgtgactgaaacgcgctccccagctcactttcttggatgagtcctccaacatcagcacgaccgcggtgccatgatcgccggaaagtttgccggtctcaatcgtttgcgccgcgttcgcatccagcgtgatttcctcggaggtcaccgaagcaccggcatcatcgtaggcgtgcaaggtgaccgtcctgcgcgcattggacgtattggccagcgtgatggaggcctttactccgtcgggaagggccaaccccgagaattcggatggctcgccggcattgaccaatgcgaaatcggcttggccggagtcaccggagcgtgtggccttgacggagaacgacacggcatcctctgcggtggacatcacgcccaacgccccatcaggagcctctcccaagtcgatcgccgtcaccttatcggcagtgacggtggcatctttggcgggaaccaatcctttgtcggtaatccatgacagcccggtgctggtgtctgccttggcgaacagataagcggtgaccgcatcgccggcagtgatggacggcgccaccgacgcattggaggcggtcggcagcggcagcgcgaaatcagaacccttcggtgtcagaccatccatggtcaccgtacgtaccacggacgcgataggagtctccttgctggaaacggtcacgaacagaccatgctgcccatcgaccgcggcggacagttccatcgaggactccccctcagctggcacagacagcgtggattgtgtggacaatgccattttcccggctgtctcggaaccccagacggcaatgtcgacggtggtcggcttggtggagggattcgagacgatgagctgctgtgtggtaccggtcgtgc

SEQ ID NO: 2965 - DNA, 11079 bp, Unknown
  R19_24m  MAG No. k141_8029
gcggagaacagggcggtcggcaccgggcagacatcgcagccggctgccgaaagaatcggaatcgcggcggtcagcgagcacttgccatagccacacatgtcatgcacggcggccacgcgtggaatatagctcggatcacggtcatacagtgttacatcggtcatgtctgttcgaaccccttcaccatgttggcggaataattcattggcgatgtttgactgtagtcgttcgtcatgtaaaccatgtaaccgggcggcagaaaaatgaaacagacgtcatcgccgagcgggcaaaccgtcttggtgacgggtggaacaagcaatcatcacggacacttgagccatacgcgaaaggcatggtagcgatatcaccgtgaccgcagtcgaccgtgaaagcgcatgcgtgcggcccggcgtgtcgcgataatttcaacgactttttcgtgacttctgacagtctctcacgtcaatgatcccaaggctttataagcccttataggcaagcccgataacgttcggcttgcgccgcgcggcccaagcgtcgtaacttcataaccaacacctcgccaaccgcccgaacacggcaggcgggtggcaaggaaaaatcctcgcgacctagcacaaccaaggagaaagacccatggccgagaacaacaagaagtaccgttttgagaccctgcagctgcatgtgggccaggagcaggccgacccggccaccgactcccgtgcagtcccgatctacgccaccaccagctacgtcttccacaacttcgaccacgccgaggctcgcttcggtctcgctgacccgggcaacatctacggccgtctgaccaacaccacccagggtgtcttcgaggaccgcatcgccgcccttgaaggtggtaccgccggtctggccgtcgcttccggcgccgccgccgtcgaatacgccgtgcgcaacatcacccagtccggcgatcatatcgtcgccgccaagaacatctacggcggtacattcaacctgctgcgccacaccctgccgcgcgacggcatcaccaccaccttcgtttccgccgagaacccgcaggagttcgaggacgccatccaggagaacaccaagctcgtctacttcgagaccttcggcaacccgaacgccgacctgccggacttcgaggccatctccgaaatcgcccacaagcatcacctgccggtgatcgtggacaacaccttcgccactccgtacctgttccgcccgctggagcacggcgccgacgtggtggtcgagtccgccaccaagttcatcggcggccacggcaccaccctcggcggtgtgatcgtcgaaggcggcaagttcaactgggccgaggtgccgggcaagttcccgaccctgaccgagccggacccctcctaccacggcctgaacttctacgaagctctcggcggtgccgccttcgtgacccgcgtccgcgccattctgctgcgcgacaccggcgccaccctgtctccattcgccgccttcctgctgctgcagggcaccgaaaccctgtccctgcgcgtcgagcgccacgtccagaacgcgctgaaggtcgtcgagtacctgcagaccgtgccggaagtcgagtccgtctcccacccgtccatcccgggccgtccggatcacgacctgtacgagaagtacttcccgaacggagcaggctccatcttcaccttcgatatcaagggcggaaaggatgcggctcgcgtcttcatcgacaatctgcacctgttctctctgcttgccaatgtggccgacgcaaagtccctcgtcatccacccggcttccaccacgcactcccaggagaccctggaagagctcgaggaccagggcattcaccagggcaccatccgcctgtccatcggcaccgagaacatcgaggacatcctcgacgatctgaagggcggcttcgaagcccttcgcgcttccggcttggccaagtgaggtcgacaggagggttgacggcccgatgagaaggggcgcgatgctaatggggtgcatcgcgaatcatcgagccgcatggggtgccttccgcctgatcgcttgacccaaggagtagaaagctcgcactgacgtcatgcagtgcgggctttcttgcgtctgtatgcctcacactgtttgcgcagaggcatgaatagtgtgagacctgagacgacataatcctcaaggatgagggccggcgcgtggcccctagcccaattcagtctggcgcacgatggggcgcgccgttatttcttcataagttggaatcatcatccgggcataaggcccggcccaatatggagaggcattatgaacgtgcagaacccgtccgcatcgcgcggcatcgctattcaggccgtcgacttggtcaagaactacggcaccggcagcaatatggttcacgccctgcgtggcgtgaacgtgagtttcgaacgcggcaaattcaccgccatcatgggcccgtccggctccggcaaatccacgcttatgcacacgctcgccggcctcgactccgccacatccgggcatattcttttcggcggggcagacctgacccgcatggacgacaagcagctcaccttgctacgtcgccacaagatcggcttcatcttccaaagcttcaacctgttgcccatgttcaccgcagagcagaacatcctcatgccgctgactttggccggtgataagcccgaccgtgcctggttcgacctgctcgtagaaaccttgggactcaagcagcgcctgaaccaccgaccgaacgagctgtccggtggccagcagcagcgcgtggccatcgcccgcgcgctgattaccaagccgaagctggtgttcgctgacgagccgaccggcaacctcgactccgtttccagcgccgaagtgctcggcttcctgaagcgttcggtcaacgagcttggccaaaccatcgtcatggtcacgcacgatgcggtggccgcctcctacgccgaccgtgccatcgtattcgccgacggacagatcgtggccgatgaatcgaatcctactgccgaaacgatgaacgagctgcttatggccgaacgcgaacgcgccacgcgcactgccgtcaccagcacacgcgccgacacgctcgcccgtcttgccggcgtagaggatgtgcccaacctgcccatcaccgacgctccattgcccccagccgggagaaccggcaccatacgccatgcccgcgccgccgcacagcacactcgctgagccggaaagcgagagacaggatacccccatgttttccatcactctgaaacttatgaagaaaagcgccaggatgctgattccggcaggcatcgccatcctgatcggcactgcgttcatcgccgctaccttcctgttcggcaacgcgatgaacgatgcgcttgccgcccagaataccgcccagctcggcggcgcgaactacgtgatcagcccggatagcggcaaggacctgaccgataaggaccaggactacatctacacgcgcacggttaacgacttccagcttgaccgcatccgcgccaccaaaggcgtcaaggacgcacgtgccggctacgcgggttccgtgaccgtaacccgtggcaacaagcatgccagcagctacgtcatcaccaccgccacaaagcgcacgctgctgccggtcaccatcacgcaaggagaccagccggcggacagcaacgagatcgccctgaccaagtccgtagccgaccagctcggcgtcaaggtaggggaccgtgtgaccgtcaactcgcaggcggcgcagtatgcgggcaagaccggcgattcggccggtaataccggtgacgctggtgatgagtcggcccagaacgccgatggcacgagctcgcacgacggtgattccgatgccgcgtccggcgcgtccgccccatccgacggcaccgacacggccgccgactccggcatgaccgtgcgcgtggtcggcctcaccgacgacccgaacggtgcctacgcctactacggtggcgcttccgtgctttccgacaacgtcatcaccgcaatggccggcagcaacgatttcggcaacctgcctgtctacctcgtctatctcgacatcgacgatgccagcgacacggccgcggcatccaccgtaaaacaggtcagcacactgctccctaagcatttcagcgtgcaatcccgtgccgcgctcgtcgaggaatccgtcaaaagcatgagctcgggcgaaaccagcatcaccaccatcttcctgctgagcttcggcatgctcgccatgctggtcgcggcactcgtcatcgccaacaccttccaagtgctcgtggcacagcgccgccgcacactcgccctgctgcgcaccatcggcgcgaacaaaagccagctgtatgtctccgtgctgtttgaagccggtgtgctgggactgatcgcctccgcactgggagtgggcctgggcatcggactcatggccgcactatgccagtcgggcctgatgaaagccaccggcatgaccatgcgactggtactatccggtccggtgttcacggtgcctatggcattcggcatcattatgacggtgattgcctcgctaggctccgcgcgttccgctaccgccgtcaccccgctggaagcgttgcgacccatcgaactgaccgacacgcgacgggccggtgtggtccgcgccgtgatttccatgctgctgattgtgggcggcgtggcactgtgcgcattctctgtatggcagatgtccgagaaaatcgccggacgtgattcaatggccgacaagcagtattcgctggtgctgctcgccgccatcatcggatgtgcattgatcttccttggactggtgctttccgccacgttctggctaccggtgctcatgcgcggcgtgggcgcgctggttgcactggccggtccgtccgccaaagtggcacatgcgaacattcagaagaacccgcgccgcgtggccgccaccggtgccgcactgcttatcggcgtgaccctggtctccaccatcgccaccggtgccgccagcgccaagcaaaccatgaacgaggcgctgaccacgcgctacagcgtcgacatgattgccgctggcgccgatatgactggcaaacaggccggcgaggcagccaaagtcaagggcgttcagagcagtatctacgcgccgacccgcatgatgaccatgaaggatgccgacggcaagagcctgagtgtgcttgtcgtgggcgtggatggcgtcgacgcgctgcgcaaggtggtgcgctccgatttgtccggtgtgaccattgatggcgattccgtactgatgcccaagtattccgccgctacaggcaaggatattccgctggacaagagcgttacgttcacggctggagcggccgaagcacaagccgatgccgccaatggtccgtccggtaatgatgcgaacggcagcgccgaaaacggcaatggacaatccggcggcacacagacgctgacgctcaaaccgcggaaggtggactatcgccgcattgcctccaactacgccgcggtcgccttcgtggacgccagccacttcaccaacggtggaatcaaggccgacgggcatatcatgcttatgcgtattgacgccgagggcgcgggtgttgcgctgaacgacgtattcaccaacgtgcagaatgtgttctccgccagtgctggcgttaccgtgaccggtccggtggccgaacgtacgcaatgggagaccatgatcaacggcatgatggcattgttggtcggtttgattgcggtggctgtgctcatcgccttggtcggcgtagcgaacacgctgagtctgtcggtgatcgaacgcacacgcgaatccgccaccttgcgtgccatcggcatgacgcgcggccaactgcggcgctcgctggcggtggaggcgttgctgctttcgctcgtctccggcgtggtgggagtggtattgggtaccctgttcggctggctcggatcctacatggtgtttagtttgtacggcgacaccgtgttcccgttcgaatgggccaccaacggtgtggtgctcggcgtcgccgcgctcgccgctctgctggccagcgtggcacccgcccgccgggccgtcaaaacgccaccagttgaagccttggccgaagcgtagagcaataagctccctcatcagagggagcttttttgttacaccagcccgttatcgtacgcgaagactacagcctgtacgcggtcacgggcgttgattttggcgaggatatgcgccacgtgggttttgacggtgggaagggagataaagagcttgtccgcgatctcctgattgctcagaccatgggcgatctccaccagcacctcgcgttcacggtcggtaagcagatccagttcgggatcggtgtatgctgggcgtgacgtattggaaccgtcggaagcggccccggcaggggaggggatgccggtcatcgagccggcaccgttgccggccgcaccgccagagacgccgacggcggaaccgtacacggcaccggagcgcgcgacatcgccggtcagcgaaccatgctgcgcgtaaccgtcctgcatcatcttttcgatgagtcgcttggtggcggaaggcgcgataatcgcattgccttggaatacagtacgaatcgaattgagcaacgtttccggttcggtgtccttgagcaggaagcccgaggcgccggcattgatggccgccatcacatactcgtccaaatcgaacgtcgtcagaatgattacgcgcgtcggccggtcgtcagccgattcggccgagacggtcgcgtcggcggccgggctggccgaatcggccgcgttgtccggcgcggcggagagcgaggtaatacggctcgtggcctcaatgccatccatgccgggcatgcgcacatccatcagcaccacgtcgggatgcagggattccgccaacgccacggcttgggcgccgtcggacgcctgcccgaccacctccatatccggttgcgaaccaatgaccatggcaaaaccggcacgtaccagctcctggtcgtccgcaataatcacgcgaatgcttctgctctcgttcatgctctccactgtatccgtttcctatcggagcgccgctccataaacaccctgattgttccctgagttcttattgggcaagtctctcaccggggtaacgttcccgcgtgttgcatctgactatccaacgaagccgccggtcgcaactgcatatccggctgcacaccctcatgggcctcgtcgctgaacccggtttcacgcaacactctcaacagctgacgcatatgagccaatgcggcgcgcccccgagcaccaatcgcggcaaaagccgcttcaatctgcatactatcaggcgcaggttcggcgttgagcatcaccagtccctcgtcagcctgcgcaatcaccgattccagcgtggtcagtacttcggtttgcatcgccgcactaatacggttgcgctctaagttggccgccagcaccttttgccgctcctgctcggctcgcagcgcctcctcgcgtcgcaacagcaccagagcgtttgcgccacgcgaacggctccatcgagccatcgcaatgcaggcaaaaccggccaacatgattcccgcgcccggcagcaagccggacaaaaccagcctccattttgagagcatggaactaccatcgggcaaaaacagatggaacagctgactgtatccattccacccagccatcaccttgatgcccgcaagccacgaatcggctgccagcgccacgctcacccagcgccaagcggactctcgtccatacaataccgccgaatacacggataccatcgcaaacatattgatggtcaaaatcgatggcaagaacaacagttgcacagcagacagcaccgccatcgccagcgcgctgccctctgggaagcggcgacggaacgccaaaggcgagagcataataatcgtcagcgttatagtcggcacgcggttcggcgaatacggggcattgccgatcatttgcaaatcgccatacgtggcggaatcaaatagcgcaatcagcacgatagtggcgataacgtccatcagaagatagtgccgctcggtccactgcgcaaatcgacccacccagttcgactcatgcgtatctccttggtcgagtactttggggcgcgcccgatccatcaatcctcgtatacgcgagataacggttagcaccggatcctccgtatcggtgccagactgtggggcggcaggggagagcggaatcgttgccgccacaataaagccaccattcggccctgggccggcctgcacgctgccacccaacgactcaatgcgttcgtgcataccaaccaatccgtatccgggcttatggccgtctgctgcagacgtcgcgccacggccgttatcggatacggtaatcgacagcacatcgtttgaccagatttcatcgatggtggctttagcaccctcgcccgcatgtttgcgcgtattggtcagcgcttcctgcacaagacggaacacggcggtttccgcgtcggcggacagccggtcaggttgcgctttgccggtcatatgccgggacaccaccagatgaccgtcaaacagcgaatcgatgtcggcatatccggtactgccactcgcaccgaacacattgaacaaacgctgcatatcatgctgcgcgcgttccgcttcatggcgaatcgtacccatcgtgtgcttggcgatggccagatcatgcgcacccgcataccggccgccatccgactgcacaataatcgtggagagcgtatgtgccaccacatcatgcatatcacgggcgatgcgtgcgcgttcggccagcgccgcgatgcgcgtctcctcggcctctttcgccacaatggaagcgttgcgctcgcgcatggccgccagcgtggcgttgcgcgctcgctgccacaaggccatgatgatgacgctcagcacgctcgattcgatgaacgccgcctccatgccgaagtcagcgagcatcttggccccgcagttgacggcgccgcttgcccccacgacgccggtgaccgccgggcatgtgggcatcgtgatggcatcggacagccagccgtcgcggatgacgcgcgaaccggaggaaggtccgtcgaacagcggacccacgttgaaagacaccgaccagaccatcgccgcgaccagtcccatgacgaacgccgtgacgatgaaccgccaggaatgtcggggattgccgtacagaatcaccgaatacaccatgatcagggcgtagaaatcgaaatacatgatcgccgggccgaacacaagatgcgtgatggtcagcgccacgaacagccaggccgccggctccgggcaatacctgcgcagcatcagcggcacgaagaccggcagcgaccacagcgtcatcgacgcctgagttgcgggaaacaatatgccgcccgtcgaatcagggctggtgacgccgatgaacggcacgcagccggcgatcagcgctgcggcgagcaacgtgtcccatagcagtgtgcgggtcgactcccgtgcgcaccatgccctcacgcgcgccataatctccataacgcgcaaggctagcgtgtccggcgacgaaccggtatcactcttcaggaggatttatggactagagtcttgaaccatgacaatgctgagcaaatactacgtgcccggactggccatagaggaccattccatcgatgttccgctcgactggaccggccatgagccaggccaagcgttcgacggcgaaaccatcaaactgttctatcgcgtggtcaccgcgcccgaacacgtgcatgacgacctgcccctgctgattttcctgcaaggcggtcccggcggtgccggcccgcgcctcaacagcccgacctccgacggatggatcgaggaggccatcaggcacttccgggtgatcctgcccgaccagcgcggcgccggccgctcctcgcgcgtggacacgcacgccatggcccgcatcgccgccgcgcacgacgatgatgccgcggccggcgcacgagcccaagccgactacctgaagaagttccttgccgattccatcgtgcgtgacttcgaacatctgcgcctgaccgaattcggtggccgcaagtgggtgacgatgggccaaagctacggcggcttcctgaccctgaccacactgtccctgttcccggccggcgtaatcgccagcttcaccaccggcggcatcccgcacgtgccggccgacgccgctgaagtgtacgagcataccttcccgcgcatggtgcgcaagacgactcagttctacgagcgctacccacaggacaaggagcgcgtggccgccatcgccgacaagctgccgactactgcggaagtcgccgaattcgttggcaaactcaccgattccgtactgaatccgatggctggtaccgatgtggagcatcgacttggcgtgatcgccggcatggccgcccacggcttcccgctgatgccgaacggcgacccgctcaccgtcgaacgcttccagtgcttgggatccgactttggcatgaagccgagcttcgagcgtgtccattggattcttgacgacgccttccttgatggcgatggttccgcttctgccgactcgccgttgtctgacgaatttttgaccaaagtgatgaacgccacgtcgtcgcgcccactgtactggccgctgcaggagttcatctacgccaacggtgagcttgacgagcccattcgttgggccgcccagcgcgtgcgcgatggcaagcccgaattcggtgctgatgaacgcccgctcaacttcaccggcgaggccatgttcccgtggatgttcgaacaggagtctgcgttacgtccgttcaggccggccatggacctgctcatggaagacacgcacttcggcgtgatctatgacgaagaacagctggcccgcaatgaggtgccgttgcaggccgccgtctatttcgacgacatgtatgtcgattccggcctgcagctcgacaccttgagccgcgtgggtaacagccactactggaccaccaacgaattcgagcatgatggtctgcacggcccgctcgtcttcaagcatctctatgacgaagcccttaaccggggcgacctcgaagaactgttctgactcaaggaa

SEQ ID NO: 2966 - DNA, 9876 bp, Unknown
  R19_24m  MAG No. k141_8198
atacgactcggcttctgcggatcgccgatgaatcgtgccggaggcagcagcgggtcgttgttccccccattggacgccgcagccactgccgcgagatcaaaaacggatgattgaccctgacccattgttcctcctttactgtgcgaaccattcatacaatcgcttattggatattcgtttacgcattggtaacatgcgtaacttcctccatcctagcgacggcccattccaacaccccgttcatctcacaatatgccagcacacgtagcgcttcccggcgcagtactactagacttgcaactatgcgtggaggcgcatgggcttccacagcgagagaagaggtccattatgacaaatccaagtatgcctccgatgccgcaaatccctcaaccgaacggtcagcggcccgcagctccgcaatttacagcaccgcagccggtcttccagcagcctgcagcaccacgccccgcgcagcccgcagcgccgcagttcgcggcgccacaatatgctcagcctgccgcgccgcagttcccggcgcaggctccggctgccgtacagccgacattcccacagcagcccgcagcacagcaagccacctataacccgcgcccggtcaaccaactgcgcaccaagcgcagcctgctgaagtacatcctgctcggcattattactttcggcatttacgatatctggcaaatgagcgaagtgggcgagaccctgaacctcatcgcttcgcgccgtgacggcaagcgcacgatgcactactgcctgatgttcttcctgatcggtggcctgacgctgggcatcggctggctggtgtggtaccaccgcctcagcgcccgtattggcgatgagcagcaggcccgcggcatgactcccaccgttaccgcagccaccttctggctgtgggacgtcttgggaattttcatcatcgtgggaccgctggtctacttctacaagctgctgcatgcgatgaacgatctgtccgccgactacaacgcgcgcggctgaaacaatcccgtccttctacacttgccgacatatttgccggggcagtgtttttactgcgtttgccgatggccgcaccagtcagaccattagttcggctccgcagtctcgttgattcataggagattccatttatgctttgccccaattgccataccgacaacgcggaaggtagcaagttctgcgaaacatgcggcacgccgctcaccgccaccgaagcgaatactgcagcgtcgagtgcttccatgacaccgcaggacgcgccggttgcgcccacgccagcgggagcgactcccgctccggctgccgcttcagtccccggccccggcggtgcggcagtgccgccgattcctatgccgcagggtgctgctggcatgtcggctccggcggtcgtctccgcaccggcggctacgcagcccactgcgaccgttgccacggccacgcagacggccccggcaacggcaaccacaaccgccgcgaccaagcccggcccaaacaaactcatcattatgctggtggcggtgctggcggccctgatcatcgcgggtgtcgctttgttcctgacatatcgttccgaggtgtggggcggcaagtcgctgcctgacccggcatccatcgcctccagcgtcaccgataagaacggcaagaaggcgtcggccgtcaaggccaaggatgtcacggccgcgctgaaggccaagggactcaacgcgaaaacggagaaggtgttctccggcaaggattcgggtgagttcatcggctataagaacgccgctccgggcgctcgtgtcaaggccggctccacggtcgtggtgcaggaatccgccggccccggcgtgccgaaagacactctgggcgcacaggtcaataaggtgactgagacgttcgccgatatgggcgttccggtccactataagaaggtgtttgtctctgacgccaagaagaaccccgaaggttcggttgtggccacctatcctgccgccggcactggggtcaaggacgacgagaaagacaagggcatctacattggcgtggccgccaagggtgacgacaccgctctgcccatcgacgtgatgggtcaggatgtggataccgtcaaatcccagctcgagtctgagggccacacagttaccgttgaacagcgtttctcttccaaggattacgtgggtaaggtttccggcgccagccccgctccgggatcgtccctgtcttccggcgaagacgtgaccctgtatcagggcatcgatgccagcgacaccaaagaagcctttacaggccatgatttggccgaaacaggcggtgacgcgctgctcggtaccacacgcgcagccgacggccagtggtgcactaatgatgggaagtgcatcaccatcgacaattacaaggtgactgaaggcggcagtgataatgctgactataccagcgattacgacggtactctgattgcctgcaacgccattcagcaggcgtactgcaacagtccgaaagccgactacctagtcacacaagattatggcgccttcgagctcatgccgcatatcagcctgaccaacttttgggccaacggcaaaatgtatgacggcaatggcgtgcatatgggtgattcttggcccacatccggcgaataccacatgcaggatctgttcctcgtagtgcctaccggctccgacttgcaggggttggaagataagggctacttcgacaaagacgcgcttgccgcagccaagaagcagaaggcggtggacaccaatcgaccgttcattctgtaccgcgatccgaagctctacgacactaccaccgctccatacaacggtgccgggaacggcgccaatccgttcctgccctacaacggatacaacggcagtaagtccgacatcgtcaagatgaagccggccccaagcgacgccgacgcctactatctggtcgaagcgtccgaacccgattgggattccctgccggacgcggacgtgaaggcgcccagcaccaaggacaagggcaactccaaggattccaaggattccaacaagagcagtaagaaatccggcacaccggatgcggcctcactgaaggtgttttctgatttggccggtgcccaatacgcttacacgattgctggcgatggcagcgccttcaccaccatttcgttggatgatcggggcaacttctccggcactgtggacgaggcagatatgagcagtggcgattccgcagcgaatgcgccacgtatccagaccaagttcagcggtaagtttgcatccgccacatccaattcagatggcacggtaacgctgaagtgtgatgcgtcggctttcaaaattgacgacaagtccaaatccgacaagtcaggattcagcccgtgtggcaccttcaccggatatccatctggaacctccagcgatgcgttgccatctgaagcacaggccatgctcgtcaagcgtggaacgccggatggaccatccgattggatgctgattaacaccgaaggctctggtgtttttatccgcacccagaaataaataacagttaagcagggttcaggcggatccaacgcttaatactcagtgaggccagttcataccggcctcacgtgtttttatcgcttcttcaccaacgagcggatgacggccataaaaccgaggctcatggcaccggccagcactgcgaatacctgcgggcggcgcaattcgttacgcatgctgatggcaccggtcacgcagtggtcctcgaaccagacgcgcacctcgttgctggagtatcggcccaccagatcaccccaggtgagcatgcgggtcacgtagccggccgggttgctttcatggaattcaaacaggcggatgcctcgatagcgcgacttggggccatagcattcgaatccgcaggtgggtgcgtagcccaaatcaatgccatgcgcgtggcccacgaaggcgttcttgtgatcgtgaccacagaacagcgcgaagtagccgcctgcctcacgcaaggcgtccacttcaccgacgttctcgtctgcacagccaatcgcctcacccagccgcgatcccggccggcagatctcatggttgagcacgtagcaatgaccggcgtgggtacgtgcgccttccaccgcgttcggcgtccatgcgggaacctctttgaggcaatcgtagaattcctgcggcggaatgtgctggaaggcgatggcaggcaccggcttaccgtcgccgttgcgttcgccaagttcggactgtacggctcccagccaatcgatcgcctcggggcttggcgtgccatacccatcggaatcagccaaatcaagaccacgcggattgaccacataggccgggtattgggcgtcgttctcttcgggcttgccggcgtaatcgccggaattcaccatcatgacggacatagctacgcgcccggatccgtcggaagcctcaatgggcagggcaaaagtgcctggctcaaggctgtcgactgggttcaggcagccggggaattcgcggtagatgccgtcctgctcgtcggccaggatgccgcactggaaatcgtgattgccgtaggtggcagcgaacggcacttccgcttcgatgaccgggccaaggaagccggcaaacgtgcggcggactttgtcacgggtctcgtccatgagctcgtccaaagtcgtcggcacatcctgtggatcggatgttgtggagtagaccagcgtggacgcggtggacgcggtttgttgggcgtcggaatcgctgccgtcggacttcatggccagcagacgattgttcacgcggtctctggcccgccgcttgattccgcgcagcttggcctcgacctcggtgaccgcacgcacgcgagcgcccggttcctcgccacggcggcgcaggaaagtgtcgatgtaggcaggatcgtaaccgcggatctggtcgccggtgaacaccaccagatccgggtcggctttgcgaatggcttcacggataaggcggatggtatcggggagcacgttggggccgtcttggatgtcggccatttgcagcacgcggaagctgccgtcttcgcggaatcgcaggttcgtcatgcctcaccagtctagggacgtaatgctgtttcgcacagcatacgcgccggtccttcacgttccccgccgctccgcacggcagctgaatcactacgagaaatcgtagaacgtgtatcccttatccgctccgctcgtcacgttgagcaatgccttgccgttcagcgtatcgacgtcgtttcctatgagatagccgtctcccgtggcccccatatccgagtcatggtaggagcctgagaaggtgccatccttattgactttcattacggttccccatgcgccgacaccggaaccgaaactatagttacctgccgcctgtttcatggcctctttgaatgtggcgtctcgtttgccgctgtccttggacttgtcaccggtcgtctcaccggaagcggccttatcgccagtgcccttgacctcggcgtccggcagggaatcccagtcgagatcgccgttctgctccaccagatagtagacggtcgaatcgctgggagccggcctcatcggcaccagcgcgttctgatagttattgatactgctgttggtcggcacaaacgggtccacgtccttgccccggctggcgctcacgctggtctcgctgtacaggctcttgtcacgaaccagaacgtacgggcggctggtatccacggccttctgcttcttggccttcgccagttcggcggcgtcgaagtaaccggaatcatccaatgacttggcatcggaaccggccgggaagtagaccaggaagtccttcatgtcgtaggtcatgccggtcgacccgttctcagccccggccggtggcgtcatttcgccatcgtcgaacgacgcccgttcatagttgccgttcacgcagtactcgcctatcgaagcggacatcacctttgagccgcagttcggcagacccatgcccgcgtacagctcgaacataccccagtctttcaacagcagatggtttttcatcggcaatttgtccgcggccatgccgtattccgaatccgcttccagcatcgcgccgctgatatcctgggagaagttggtcaggcccaacacatcggccttgtcttcaggctcatggcctttgatttgcaggtactgataatcctcggatgaagtggagccaaagggattcatcgaggattgctccagtgtgatgcagtccttggcggcatccgtcacctcgctcttgcagtacataccgatcattgcggacgcgtggatgctggccatcttgatgttgtcatacgagttggttttgctcagcacgtccatgttgctggacttatcgatgccgtaatacaaggtcaccgactggccggaactcaacgtggatcccggagccgggtacgagccggaaatcttgcccacgtatttctctgacgagtaatgcggttccaaatccacactgtagccttgcgactccaagtcgctgacggccttgttcttgtccgcaccaagaatatccaccgggataccatcgcccttggaggccacgccaatgtaaatgccgttgtccttctcgccatcggtgagccctacaccgggagccgggtacgtgacgctgacctgcccttccggagtcttgctgtccggcgaaatcacaaccttcttatagtgaatcggcacgcccatattcgcgaacgtgttcgtcaccttgttcacatccttgccgaccgtgcccttcggcacaccgggaccggccgactcctgcaccaccaccgtggaaccggccttgacgcgagcgccaggattcgtgccctcgtagccgaggaacacaccgcgatcctcgccggagaacaccggaaccgtcttcgcgttcaggcccttggccttcaacgcctcggtcacatccttggccttgaccaccgatgccttcttgccgttcttatcggtgacgctggaggcgatggacgccggatcaggcagcgacttaccaccccacacctcggcacgatacgtcaggaataaagccacaccggctacgatcaacgccagcagcaccgccacgagcgcgataatcagcgtattcgggccacgcttgcccgaaagattcggcaatgtggcggttgcggtcgttgtgccgctcggcggcgtggctgcgcccggagcgacaggagcacccggagcggcctgcggcactgctcccggtgcgatcgacccagtatgacttgctcccggtgcggtcggcgctcctgccacaccgctcgatgtcggcacgccggactgcccataggcgttcccatcgtttgggccgggcagcggcgggtgatcaagcaccgtcatagtattgtccggcagcggcactggaatcgggccggccgccgcctgaggagcaggagcactcacgtcggttagcggcgcaccacagtgcatgcagaaccggcttcccccatcattgtcagcaccacaattcttacagatcatcattgctcttctctctggtcgaatgacgcactatagcctcattctactgggaaatgaacgcgatggaatagtccccactcagccgccaaccaaaaggcgtggtccgtatacacagttgcatgtgcaaatactgcttgtactatttgcgcaacgtgctatccaccgaggcaagcacttggctcatcagctgagcggcacgatcctgaccttggttttgcgtgaccacagagaccgcggccttgttgccattcacctccacgatggcgaagtaattccacgtgttctggatgcccatgccacgatgtgcatgcacggtcatgccgctcggaatcaccacgccctccgaagcaatatcagtgttcatcagaccagtgccaccgaccgcatcaacggcaaccagcatgcgggccgcgtcacgagcggtactgtaattctcatatccagcattgctggcctgtacatcaccgaaatcacggttgaagctggtgccgctgtacccatgggaactcagccatgaattgacagcactccatccgccaagggccccgacagcctgattgccggcactattatccatgccggtcatcatcgtatttgccaatccttccgcattgccgttgccttgagaggcaagatacaccggcagatacaggcctgcggcaacgaacttcttactcgactgcgacgtattggcaatggccgagtcttcagacgacgcatcggcgctgggagccacatccatcttcactagcgggttgtatccaccgctcatcggtataccgggtacaaacggattggtggtttgctcgccgttcttgtatgcttcgacgcttgtggtcttgtatcccttggggtcgcgcatgatgaagaacggccggtcggtgtctggcttccccgccttgttcgccgcagccagcgccttgttggagaaatagtcggaatcctcgagtttgctgatcttcgatcccaccgggaagtaaacgtagaagtcatccatttcgtaggtggcaccggattgctgaccatcagggatatcatcagtcctcacatattgaccatggtcacacccttccgtctccccatagcctcggtagaccgtgccgtcgcataccggccatccgtagccacggtacatctcgaacatgccccactgtttggccaacaagtggttgcgcatattggtttcattatcgggaatcgaaccatccttgtagtgcagaatgcacccgccaatgtctccggtgggcgtgcacagtgtgacccgatcgttccatatgccattggactcatcgccgttgcgcaccaaatacgggtaaccggacccgtatttcattccgtcttgacccttcgaaatcagcgagatgcatccacccgagccaggtaagaaaccatccttgcaataggtgcccgtaacacgccattcgcccgcagccgagatatacggcaaactcctgtcactcttgctagtgctggcataatccgcgtgcgggtcgaaatcataatcactacctgaaccggtggtcaccacatcttcagtgttgtcggctcccacaccgtagtacagacgtatcggttgcaatattttataatcattttcctcattgctcgcctcaaacggcgcaccaaaaatgtaattggaagctacgattttgccaaaatccttcttggcggaaaatcgcggctcgagaataacctcgatcttgttgttcgatgcgttttctactgcggttttcgcctcatccttatccataccgataacgtcggccggcatgccctcgactgagggatccgggataccaagataaatcgcaccattatcgtccactggctgcccccagccgggtaggtatacacgactttcttcgtatcggccttggatgttgcggctactcgcttggcataaatcggcacacccatatctttaacggccgcagcggccttggcgacgcttatggcccggtaccggcgtctgcggtaccgcgatagtggcgggcgcagacgacgctgggccgaggctagagctgagaccggggccgggaatgggaccggcgggtggcatcggcacaggcggaacatcagtgaccgtattgtgtcccacggcaagtttcggtgccagcggagcaccgcattccgtgcagaaacgggacctatcgtcattggcagcaccgcacctatcacagttcatcgcgtcttctctctgatgaaatgatgcaatatgcctttcattgtacagagaaaacgcacactggcggagtcaacggaacagactcaccccgcgacgggccgtgcaatacgcgttgcccagccaggtatggcgggaattgggccagacagctcccagtcgcggtgcgttctggctcatccagatgctcggcacgcggccgtctgcggagcgtgagccg

SEQ ID NO: 2967 - DNA, 16881 bp, Unknown
  R19_24m  MAG No. k141_8840
accagcgtggcgatgtgctcgcgcaccgactgcagcaccgacagcatcggcaagtcggccttgccgccagtggccttgtcgacttcggcataagccttgagcacggcgatcacgtcatgcgccacctgatagacggtgtcctcgtacacttcgcgcacatcgagcaccgcattggccaacgcctcatcgtccgagagcctgtcgacattcggcatcagccgtttgactgtggccagctgcaggtcttcgaccagatccttggtggacttgtacggagcagaagccagcatcaacgcctcggtacccagccagcgcgacgaaatgcgttcggccggcaaccgcagcgcatccaatgcgccacgccagagcatcgtggcccgggactcggtggtggcacccgccttatgcaacaggttcgcctgactgaccagcttgccctgttctccagcctgatcggcctgcttcttgaccatctgacgggccgacgcctccgcctgcgcggcgaacttgcgttgcagcgccttcagatccttggacacacccagcaccttgacggggccgcgcgcatgccggcgtccacgagggtgcttgccggccggcagttgctgctccaccgagaacgtgaccctgagatacggggaaagacgctcgaccagttccggccccaacacttcgggatgaatctgcgcacccttggtggcgatggccgccttggtgaacacatgtgccaaatcaggccagccaacggtcgtgccatcctcatccaccggcggcagattcggcttctgctgcgagcccgagcccggcagatccgggtaatgctcgtcgatccagtcacgaatcgcacgcgcggcatccggggccggcacgaactggacgcgcagctgcttgggcagcgccttgatcatcgacagaatcagctcatccaacaggcccggcacattccatgtgaactggtcgggcgtgatacgcgagagcgccttcaacggcacatgcacggtgacgccgtcggccgggtcggccggatcgtatacgtagctcaaacgcaggtcgatgggttggccgtccgatccggtcgtatgccaatggtcggggtaatcgtccagactcaccgaatcgctggatgccagacgctccaccttggctgggtcgaaatcaagcagattcggctgacggtcatgctcggacttccaccatttcgccagatcggccacgctggtcacatcgttgggaatgaccgcgttgtagaagtcgaacagatcctcgtcggacacggtgtccgccagctggcgggtgcggctcgcgtcatcggcggcatcctcgagaatgtcacggtttttgcccacaaagtcgtcgtaactgaagcgctgctgaatatcgccctcgaccagaccctggcgaatcaggaagtcgcgcgcctcaagcggattgatgcgtccccactgcacggcacggtcctgtacgatcggcagaccatacagcagcacgcgcgcggtggccacagccgagccacgcgaacccgaccagtgcggctccgcatacgtggtgcgggtcaattggccggccaacggttcggcccacgccgggtcgatggccgccgaatagcgggcccacaggcgagaggtctccaccagttcggtgctcatcacccatgacggggtcttcttggccacggcggaggcggggaacagggcgaaacgggtgccgcgcgcgccctgataatcgttcttcgactgcttctgggcgcgtttcatcgcacgggcgcgcgccgcaccggtcagccccgcgaaatcggaggccttgggctcacgcaccacctgcatgcccatcatcgacagcaatccggcgagcatcgacttgtggatgccatccgcatcccacgagcagcacagcgaatgcgcggcctgctgattcaacggcagctggcgaatctccaagcctgggcgggaggcgggcaacgggtcgccgaccttgaacttcagctccttgcacatctggcgtagctgggagacgagatctttccactggcgtatcctcagccagctgagatactcggttttgcagatacggcgcagcgcgttgttgctcgggtcgccgtccgcttggaacacgcgatcccagatgttcagggccgtcaggaaatcggaagtctcatccgcatatcggttgtggatacggtcggcatcctcacgcttgtcgtccgggcgttcacgtgggtcctgcaagctcaggaacgccacgaccacgagcacctgggccagaagattcggcgaaccggttttcgcggcctcgataaccatacgtcccagacgcacgtcgatggggatgcgcgccagctgacggccggtatgggtgagcgtcacctcgccgcgctttcggccgatggccttgagctcggtgagctcattgaaaccgtccgacacggccttcatatccggcggatcgatgaacccgaagttcgtgacgtcctcggccgtgcgggccacgcccaccgacagcatgtgaagcaccacggcacccagcgaggtacgcaggatttccggctcggtgaagcgcggtcgggtctcgtaatcctcacgcgaatacaggcggatcgcgatgccgtcggccacgcggccgcatcggccggacctctggtcggcactggcctggctgatcggctcgatcggcagacgctggacctttgcggtcttcgaataccgggagatacgggcggaaccggggtccaccacgtagcggataccgggcacggtcagcgaggtctcagccacattggtggcgatgacgatgcgctgatgcaaatgcgattcgaacaccttgtgctggtcggcggcggacaatcgcgcgaacagcggcatgatctcgatggcgtccggtcggcgcatgtcgtcggcgcgcggaccgtaatgatgccgcagtgcggcctcgaactcgtggatgtcgcgctcgccggaagcgaagaccagaatatcgcggggaccgcgctcgtgggaggagtggatcaccagttcggcgcaggctcgagccacggccgtgggcatatcggtgatgccgtcatcggcataggagtcgtcggaccggccgcggggccggtcggaatcggattccgcgatggcgctggccagctcgtcgtaatcggcgtcgccggggcgggcgcccaccgcgaatcccggcacttcgcgcatcaacgcgggcgcggtgccaagcggctcatagaccacctgcacggggaaggtgcggccggaaacctcgattaccggcaccttctcatgcaaggcgtgctcgaaatgctcctggaacttgaccgaatcgatggtcgcggaggtgatgatgagcttcagatcgcggcgctgaggcagcagtgccgtcagatagccgagcagaaagtcgatgttaagactgcgctcatgcgcctcgtcgatgatgatcgtatcgtattgggtgagtttcggatcgcgctggatctgggcgagcagaataccgtcggtcacgactctcaatcgcgtgctgggcgagctttcgtcggtgaaacgcacctgatagccgacctcgtcaccgagcttcacgcccatctccgaggcgatacgttcggccaccgtgcgcgcggcgatacggcgaggctgggtgtgcacgatctgcttgccgtgcgtgccacggccaagctcaagcaggatcttcggcagctgtgtggttttgcccgaaccggtctggccggacacaataacgacttgggaacgtttgaccgcgctggctatctcatcacgcgcggcagatacgggaagttctgcaggatactcatatttcatgacggacttcaatgatacggaagcccttggagctcgcgtatttgctcgcagtgaacccctcgccgagcgcatcgtccagccaggggatcagcgaatcggaaccgagattcttctgcactacgagataggcggcaccgcccaccttgagcttcggcagccaagccataagcaatgtatgcagcgcttccttgccgactcggatcggcggattcgaccaaatcacatcaaacgtgaggtcgcccggcaccgtctcgcagaacgccggctggttctcggcgggcaggggagtgctggactcgtccacctgagccgtatgaatgttcgtgcgtccgttcgcctgtgcgttggcatgggtcaggtccagcgcgcgctcgttgacatccaccgcccacacgttcgcttcgggcgactcaaacgccaatgtcagggcgatagggccccagccgcagcccaaatccaggaaatcgccggtaagcggcggctcgggcgcatgcttcagcaataccgatgtaccgaggtccacgcgcgagccggagaacacgccgttcgacacctgagcggtcgcctcatgaccgcgcaacgttacgttcaatgtgcggcgcacatctttcgacgcgggttccgcagagaaatactgttctgccatggtcgctccatttctgcgggattcgccgctctcgtatgccgacctgtatcagccggcctatgccggtacgtgccgatctatgccagcatgtcacctcatgtgatgataataaaggaccatagaagaatcgtgaaccattccaaccaaacgaggcgcacttgaccgacaacacccagtacaccgacatcgaccgcggcaacaacgacgttacccctgaaggtgtgctggccgggcagtccgaagtgctgctcgacgacagccagcgcgcgaccggctggcacgaggacgccaaccaggaatgggaggagcgcgaggcccgcaacgagctcaagcatgtcgccggtctcggcgagctgcaggacgtcaccgaagtcgaataccgcaaggtgcgactggaacgtgtggtgctcgtcggcgtctggtcgtccgccgtcaccacgcaagccaaggccgaggaatcgttgagggagttggcggcgctcgccgaaaccgccggtgcggtggtatgcgatggtttgctgcagcatcgctccaagccggatgcagccacgtacgttggttccggcaaagccaaggagattgccgacatcgtggcgcgtgaggaagccgatacgattatcgtggacgacgacctgccgccgtcacagcgccgtgcattggaggacgcagccaaagtcaaggtggtggatcgcaccgcggtgattctggacatcttcgcccagcacgccacctcgcgtgaaggtaaggcgcaggtggagttggcgcagctcgaatacatgctgccccgactgcgtggttggggtggttcgctgtcccgtcaggccggcggtcgcgcggcaggcgcggatgcgggcatcggatcgcgaggcccgggcgagaccaaaatcgaaatggaccgtcgtgtaattcgcacgcgtatcgccagactgcgccgtcagattcgtgagatggccccggcacgtgaggtcaagcgcggttcacgccgtcgcttcggcctgcccacagtggccgtggtcggctacacgaacgccggcaaatcctcgttgaccaaccgtctgaccggttcggccgaactggtggaaaacgcgctgttcgccacattggacacggccgtgcgccgcgccaaaacccgcgacggacgcgcttacgcctacgtggacacggtcggcttcgtgcgccgcctgcccacccagctgatcgaggcgttcaaatccaccctggaagaggtggccgaggccgacgtgatcctgcacgtggtcgatggctcccaccctgacccgttctctcaggtcgacgcggtcaatgacgtgttggcggacatcgaaggcacggcctcgattccgcgtattctcgtattcaacaaggccgatcaggcggacgaggcgacacgtgaacgactcgccgcactgcagccggatgcgttcatcgtctccgcctataccggtgagggattggacgagctgcgtaccgcggtcgaaagtctgctgccggtcccgcatgtgcatgtcaacgctctgctgccgtataccgctggctccctgatctctcgtgtacgcgaatacggcaaggtggacaaggtggagtaccgcgatgatggcatacagcttgaagcggacgttgacgcccatcttgccgctcaggtggtcgaacagtccattgactaacgtgataaacatcacagtttgtttgtgagcgctaacaaccgttggaaacattaccataccgttatcagacagggtggtgtgctggtagcaaaacgtcttagcgggtttatagagtgaaaaccgttagttacaaggcctgccattcatcagcagaccgcctttgaagagaggttcatccatcatggcggaaactaccgttaagcccacgaagcttgctgttattggtgccggtgccgttggctccaccctcgccttcgccgctgcccagcgtggcgtcgctcgcgagatcgtgcttgaagacatcgccaaggagcgcgtggaagccgaagtgctcgacatgcagcacggctccagcttctacccgaccgtgtccatcgacggttccgacgatcctgagatctgccgcgacgccgacatggtcgtcatcaccgctggtccgcgtcagaagccgggtcagtctcgtcttgagctcgttggcgctaccgtcaacatcctcaaggccatcatgccgaacttggtcaaggtggctccgaacgccatctacatgctcatcaccaacccggtcgacatcgctacccacgtggctcagaagctcaccggtctgcccgagaaccaggtcttcggttccggcaccaacctggactccgctcgtctgcgcttcctgattgcccagcagaccggcgtcaacgtcaagaacgtgcacgcctacatcgccggcgagcacggcgactccgaagtcccgctgtgggagtccgccaccatcggtggtgtccccatgtgcgactggaccccgctgcccggccacgatccgctcgacgccgccaagcgcgaggagatccaccaggaagtcaagaacgccgcttacaagatcatcaacggtaagggtgccaccaactacgccatcggcatgtccggcgtcgacatcatcgaagccgtcctgcacgacaccaaccgcatcctgcccgtgagctccatgctcaaggacttccacggcatctccgacatctgcatgtccgtgccgaccctcctcaaccgtcagggcgtcaacaccgccatcaacaccccggtgtctgacaaggagctcgccgctctgaagcgctccgccgagacgctgaaggaaaccgccgcccagttcggcttctgataaaaaatcgctgtacggagcgcctttcacaccgcacaaggttcgaactacctttgtaggccttcaccttgtgcggcacgaaaaatcgcacacgtacagtgattttttataccctgctgaatgcttccagaggaagcattttttattcgtggaattcgttggaggagggggagctatagccctcgggctcaagctggaaggtggtgtgggggaccgagaccgggaagtgctcgcgcaggcaatcctgcagttgggtgaggattgtggcggcatcttccatggtgaggtctttgtcgactaccacgtgggccataagaatcggcatgtcggtggacaccgtgctggcatggaggtcatgcacggcaagcacatgcggcacgtcttccagatgctcgcgtaccttatcgagatcaagaccatccggtgtttcctccagcagcaccttggccgcgttgtgcagcagcttgatggcgcgcggaatcatcatcagtgcgatgacggcaccggccacggcgtcgaagccattccatccggtggagatcattaccagggcagaggccaccacagacaccgagccaagtgcgtcgttcattacctcgaggaacgcggccttcatgttcatgttgtcttcgcgctgcgaggcaaggatgaagatcgagatgatatttgcgacaagacccagaatgcctacgaacagcagcaagccgatatcgtcgatttccgctttggagccgccgaacagacgcatgccggcctctaccaacgcatagatgccgacgataagcaatactacggcgcccgcggcagcggtgagcacctcaagcctggcccagccccaagtacgagtgttgttgggcttgcggcgcatcagtatggcggtgattgtggatgccaccagcacggacatgtcggtgagcatatgaccggcatccaccagcagggccagtgagccggttaagacggccgacaccacttcgatgaggaagaccgaaccagtgacggtcaacgtggcaatcagcctgcgctggtgcgcggcagggtttacggatgtggatggtgcgggtgtatgggtatgggccatgtgtactccttcgctctatcgagttgaaaccgcttctcaataccatttgcgatatggtctgaatacgacgaaaccccggcgcgaggccggggtttcgtaagcagtgtgcgactatagcacgaccagcgcgattcagcgcacgctgatcagctggtggcgaacaggctataatttgcgcagtacggtgaccaccttgcccataatcgtggcatgtgtgccgtcgatgggcgagtatgcggggttgtgcggcatcagccagacgtggccgttttccttgcggaaggtcttcaccgtggcctcgtcatccaacagagcggcgacgatatctccgttgacggcggaattctgttcgcgcaccaccacatagtcgccatcgcagatagcggcatccaccatggaatcaccgtggacttccagcatgaacagggtgccggagccggtcagccgttcaggcagacgcatgacgtcgtccacatgctgttcggcggtaatcggcacgccggcggcaatacggccaacgagcggtacgtcatgtgattcggcaatagcttcggcggggaattggtatatctccgccacattgctggcgctggttgcctcttcgctggcttgtgatggcttttcggcattcggggcggatcctgccatcacctcgatggcgcgacccttgttcgcgttcatgcgaatgaagcccttgtcttccaaaacttgtagctgatgcttgaccgaagacggacttttgagcccggcggcatttccgatctcccggaaagagggagcaaagccttgttcgtcgatatgcgtgcgaatggcgtccaacactttgcgctggcggtcggtcagggtggactcgtccggcttctgcttgggggagaggggaatggtgctcacgtcagggctcctttcgttatgtcaccagcataacgtgttgttcgtgtgaaatcaaacatctgttcgagcttcgacttgaccgtgtcgaacatttgtgccattataagaacagttgttcgatagaacatctgttcgagagaggtggtcgtgatgactggttcaatggtgatggccccggcccgtagcgcacgtgtagctatgcagcatgctggaacgtcccgccggaatgtgcgtgggcggattatcgcagtgatgatcgccttggcgctggcctggtgtggtttcggcgcgcttaccgctcagcgggcccaatcagatacgggtgccacgcaggtgaccagctatatcgtgcggccgggggatacgctctggtcatatgcttcggctattacacctgctggccatgatgtatcggaaacagtggatgagctgattacgctgaacaatctcgagtccggaacattgcaggccgggcagcgcattattgttccggttgagtaaatgaaacccgagcggcatggtttttccgcccgtacacgttattctggagagcatgcattgccctttttgccagaaccccgacaccaaagttattgatacgcgcattagcgatgacggtcattccatccgtcggcgtcgcgtatgcccgaaatgcaacaagcgttttaccacggtggaaaccagtatgctgctggtcactaaacgttcgggtggcgtggagccattcagcagagacaaagtgatttccggcgtacgtaaagcctgccaggggcggccggtcagagaagaggatctgaagctgctgggacagaaagtcgaagaggatcttcgctcccgaggccttgccgaagtcacctcagatgaagtgggcaaagccatcctgaaaccgttgcgtgacttggatgtggtggcgtaccttcgattcgcgagtgtgtaccagaactttgcaggtctggaggatttccaaagcgccattgatggtttgcgtgaataatatgcgaatgccatgcaccgtgatatgcgagtgattcgcaaaccatggtgcgaaccaatcatgaagccctgcacttatgaaagagacccgtcagcgtgaactgcgccccgattgttggacgtggtttattaagggtacctgattaggctgtgagggacatgttccggaattcctccggggtgtgtccctccagtcgtatctggcggcgtttggtgttccagtggatgatgtacgcgtccagttcgttcttgaactgttcgtatgaggcgaactcgcgtccggcgtagaactcgtccttgaggtggccgaacacctgctcggtcgcggcgttgtcgatgcagttgcccttcctgctcatggactggcggatgttcagtcccgcgagccggtcgcgccaccaccggtgccggtactgccagcccatgtcggagtgcaggatcgggttggcgtcttcgggcagcttctcctcgagcatggcgagcaggcgccactgctgggccatgtcgggatgccggctgacgtcccaggccacgatctccttggatcccatatcgtatacgggagccagatacgccttgccgtcggcgaccctgaactcggtgacgtccgtgcccagcttcacccacggccggtcggccgtgaagtcgcggttcagcaggttctccaccctcgcgcccgtctcgccccggtacgagctgtatttccggtacgggttcggcctgcgtatccggcattccaggcccatgcgcctcatgaccttcagcacgctcttgtggctcacccgcaccccgaactcgtgcacgaggcacatgcgtatctgccggtggccgcacccgttgggcgtgcgcgcgaatatctcggcgaccatcggctcgatgtccggccgggtcacggcggccggatgcgacagaagatggtaatacgtgcttttcgccagtccggccgccctgagcaggtgccggagctgatgtcccagccccgccagcatggagacgatcaccgttctgtcccggttgccgatctccacgccagcagggcgtcgactttttccaggtacgcgaccctcgccttgaggtacgcgttcttctcctcaaggagctgttcccttgtgggagccggcctcggcttggatttcgcgcccttgggcctgcccttcggtttcggacgcagcgcgtccgggccgccggaccggtactcgcggcaccaacgctccaacggggtgagactcgcgatcctgtacttctccatgacttcggccttcgtcagcccatgctccacatggtcgcgcaccgccgcgagcttcgtctcgtagtcgtatctcctgttgccttcgcgttctcccatgagcgccgcctccccgccaaaccggtatgacaacacccattttcccgcggtactgacgggcacgccaagccggcgggcgagagaacgcctcccagccccgccccggatcaggtcggcgacgacccgcatgaaaccgtcatcgtaatgacgcctgcgatccctacacatgagaaaccgcacctccgatcatcgaatctgaattacttcagtccaacaatcggggtgcggttcagcgacgggtctctttcatatcaatcgaggatgagctgcgtcagctgatgacacgcatgcgaacggtgccctcgatgttgcgtagtgcttcaagcgtggcggcgctgggcttctgagccacgtcggtgaccacatagccaagttcgccttcggtggccaacgactggaaggaaacgttgatgttctcttcgccgagcacgcgattgacatgagccagcacaccaggaagattgtcgtgcagatgggcgatacggcacacgcccttgcgttcacctaggttgatctgcggtaggttcacggacaatgaggtagaacccttgaaccagtaatcctcaagacgctgagagacgaaatggccgatggattcctgagcctccaaggtggagccgccaatatgaggagtcagaatcatattgtcttcgttggccagtgaggtctcgaacggatctccgctcttcttcggctcaacggggaacacgtcgaccgccgcgccagacagatggccggaatcgaggtgctgcttcagagctcccagatcggcgacgaaaccgcgcgaaaggttaatgaaaatcgcgtcctgcttcatgtgggcgaattggtcttcgccgaagaagccggtgttcgacttgcggccatccacgtgcagggtcacggcatcggactgttccagcagttcgttgagggtatcgcaacggtgggcgttgcccagtgccagtttctcctcaatgtcgtagaacaccacgcgcatgccgagggcctcggccagtaccgacagctgggagccgatgttgccgtagccgatgatgccaagggtcttgccgcgcacttcatgcgagccggaagcggacttgtcccacaggccatgcttgatgtgatgcgtgtgtgcgggaatgcggcgcatcaagcagatgatgtcgcaaatcaccaattccaccacggaacgggtgttggagtagggggcgttgaacacggcgatgccacgcttgccggcatgtgccagatcgacctgattggtgccgatgcagaagcagccgatggcgcttagcgtaggacgcgcatccagcacgcgggctgtgacgttggtcttggagcgtacgcccaccaagtccacgccatccagcgcgtcgatgagttcgtcctcgctcagggctcccttcatggtctcgacttcgaaaccgtgatcacgcagcgatttggccgcgtcggggtgaatgttttccaataacagtgctttgggcatgcttcataccttagatgttcagggacttttcgtccgttcttgtccgaactataaccagtttctgggtcggcctggtcattgccacgtacaggtccgaggcggcgaccaggcggctcggcgcgtcatcctcgatgagaccgggctcgaccaccacgacggcatcgaactccagacccttgaccgtttcggtgccgcagacgctgatttgctcatcccattcgggctgctcgatgagccttgcgtattcggccgggtcaagaacggcggccagtttgcggcgcacggcgtcgcgcaccggggcgatgagatcatccggacagatgacggcgatgcggccggtgccgtctgccgaaacgaattgttcggcaagcagcgccgcctgctcggccgtcgtttccagcaaggacgacatgtcgggcaccacattgcgggacaccgaatcggggatggtgcgcaccgcattgaccgtggagatgtagaggccttccttctcggcaaatcgtgaggcgagttcggaaacttcctgcggattacggtagttgatggtcaactcgttcagatcccagtggctttcgccgaacaggcggttcatcgatttgctccagcgtcgggtgccacccagcgccgaggtctgcgccacatcgcccacgatggtgaacgagcgggaggggcaacggcggatcaacatacgccagtccatggcggtcagttcctgcgcttcgtcgaccacgatgtgcccgtaggtccattcacggtcggccgcggcccgctgcgcggtcagctcggcgtcgtccccgttcatctggtcgagcagcatctgactggagacgatgcctccacccagaccggtcgcggccagagtgtctttggcatactgctcttcggcggcacgacgtgcgtcggcggcggactggcgggccaccgccttgggatcggggcccagcatatccattgcttcgtcgagcagcggaatatcggagcgggtcaacggggagcctttggggcgggcaagtgccgcgatgtcgttgtcggtcagccaaccagccagagacttcagacgttcgggatgggcgaacagctgatcgatgagccatggggcggtcatcggcagccagcacaggttcagggtcttgcgaacctgctcgttcatacgtagcagcgacatcgcgcggttcagctccgcctgatccggcgtgtaatcaagctgttcggcataacggttctgcatgctggtcagcatcgaacggataaaggtctcgcgggccttgttatgaggttgtcgggtgcgcttcgcgtccgcctgcgcctgctcgatatcagtggccagcattggtacctgaatgccgctaatggttactgtcggcagagcagcgggaacacgcacgcgtgcggcgatggcattggccactacggaggtcatgcgtcgatcgcccttgagcttggctgcataaggggagtcgaccgccgtggcggtgatgccgggaatcagatcgctgatggtgcgtgagaccacgccggtctcgcccaaggagggcagcacctgatcgatgtagtgcaggaacgccgagctggggccaacaaccagcacgccggaacgttccagcgtgcgccggtgcgtgtacagcaggtaggcggcgcgatggagcgccacggccgtcttgccggtgccggggccgccctgcaccaccacggcgcgattcatgtcggagcggatgatgcggtcctgctcggcctgaatggtggccacgatatcggtcatcttgccggtgcggcgtgagctcaacgaagccagcagcgcaccctcgccggtcaatgtgccggcggaagacgcctggccgacctggtctgaatgcacgtcgagcacctcatcctcaacgcccacgacttcgcggaaactcaaggtgatatgcctgcgcatcacgatgtcgccgtgattggaaggggtcgcctcatagaaaggacgtgcggcttcggcacgccagtcggtcagaatcggctcatggtccgggctcgacaggccgatgcggccgatgtaatgacggtcgccgttcttggcgtcgagacgaccaaacaccagccgatcctcaacgctgcgcaattgcgtgaggcggttttcgtacattgtggcaaaggagtctcgttcgctgcgttgcgtgggggatccgtgggagccggcggcgcgtacggtgtccaggcgttgccacatttcggctcgcagatcatccaatcgtccgtaggcgcgatcgacggcctgctgctcttcatgcagctgggaggcgtaactcgacatgctgttctcttcgttccatttccgtggggcagaaaaacttaaggcattcaaatttaccgcacaccccctacgtcagtgatgcggacaactcggaataggtgaattcagcgtgaattcaccatgctgctcggtcggtggggtgcgcgacgtggattggatgtgcggagcgtccattcgtgcgacagtcgtggccgacacgcgcaatccatcggtaattgccctaaaagggtgagcaaatcgtgcatgagtggggagaaatggggaatcgtggggtagagtagtgagccagttggccgaagtgtatcccacgtaacgatgaaggaggtggagccatggttgccgatcagacgattcgcgacgctgatgccaacgcacaaggctccaccactatggccgatctcatggctggtctgccgccattgcttctcggcacatatacgccgaagatcgatgccaagggccgtatagcgcttccggccaaattccgctcccagctggggcagggcctggtcatggcccgaggccaggaacggtgcgtgtacctgctgccgttcgacgaatttcgacgtatcgcctcgcagattcagcgtgtgtcggtgggaaacaaagccgcccgcgaatacctgcgtgtgttcctttccggtgccgtcgaccagcagccggacaagcagggccgcgtgctggtgccgcagatgctgcgcgattacgccaatctgggttccgacgtcgtggtgatcggcgttggcacccgtgccgaactgtggaataaggacacgtgggagtcctacctcgccgagaaggaagagggatattccgatattgctgacgatgtgttgccggaggtggaattctgatggttgatgtggcgaatattcatctgccggtattgcttgacgattgcgtgaacctgatggcacctgccctggaacatgagaacgccatcgcagtggattgcaccctgggccttgccggccattccatcgccttcctcaaggccgcgcctcaggctcggctcatcggcattgaccgtgacagcgaagcgctggggctggccgctgaacgcatggaacgggaggggctcgccgatcgattcattccagtgcatgccgccttcgatcagcttgatcaggtgttgacggaccgaggcatagaacgtgtggacgccgtattcatggatctgggattatccagcctgcagatcgacgaaaccgatcgtggcttctcctattcgcatgatgcgccgctggatatgcgcatggacgtcagccagccgttgacggccgaacggattcttgccacctatgatgcggcggaactggtccgcatattcaaggaatacggtgaagagcgtttctcgcgtcagatcgcccgcgccatcgtggcgcatcgagacaaggagccgtttaccaccaccgcacagctcaaccgtctggtcgatgaagtggtgccgcaagcccaccgcccggcgggcaatcccgccaaacgcgtcttccaggcgttgcgcattgaagtcaacggcgaattggacaagctcgcctccacattgccgc

SEQ ID NO: 2968 - DNA, 13653 bp, Unknown
  R19_24m  MAG No. k141_8966
cagccggcgttccggcaccgccacctgatccgtcccgagctcgtccttccgttccgcttcatcggctcgccgcacacggcgcaacaaggtgtgttcatccacccaatctgccacgccaactcgaaagtcactcaaccgttgtgccgcaaggcctgaccggccattccggacacacattctggccgacctcgagttccccgcccatacaactcgaacaggagaaacgcccactgccacaaaggaacacaagacaaaacggacacacattttggcctataaccccaaaggctcgcgttcgccaacaactgtcttcctcgccgcaactacgcacgccaacagcaccaatgcgaacatcgggttagggttaaataaagaaacgtgggtcttatccgcgcgtgtcatggtcggtgcgatcgtccgccccagccgtttctggggctgtggtgctcatagagtcagtattgcagaaaaagcacctgcgaaatgcgcgtgcgaagggaatcgtgtgggacggcacgtgattttgccgattttcgacgtgccgtcccacagcgttcgaagaacgccctcagagctgagggcaaagaacggctctattctgcggttctcggcttatgtcatgcgggatagcagatacgtcaaacgattgatgtatctgctatcccacacttctgtgggacggcagatgaacaatggtaaaaaccgcgtgccgtcccacagaaacggagtcaggcctgccaccattggcgcagagggtaccacttgccgtccgggtggcccacgcgatccggcttgacagccaggaactggtgaatctggatgccgtcgagctcgaagttcagagcgcaggcggccatgtacataccccataccttggcgcgttcaaagccgacctgcttgaccgcgtcgtcccaatgctcggagaggttctggttccagtgatgcagggtgagcgcatagtgctggcgcaggttctcctgatgcaccacgttgaagccggcgtcatggatgcacgattcgatgaagccgggcgcgccgaggtcgccgtccgggaagatgtaacggtcgaggaattcgtcggtgccgggcttgccgtgaggcttgtcatggctgatggtgatctggtggttcagcagtcggcccatcggcttcaggagacggaacatctcttcgaagtagctctggtagttcttgacgcctacgtgctccatcatgccgatcgagcagataccgtcgaagtcatgctcgggcacctcgcggtagtcctgtacgcgcacttcggccagatcctgcagcccttcacgggcgatccattcgttggcgtacgcggcctgttccttggagagggtgacgccgagcgccttgatgccgcgacgggcggcggtgatgaccatcgaaccccagccacagccgatgtccagtaagcgctggccgggctgcaagtccagtttgtcgagaatcaggcgcagtttgttggcctgtgcgtcttcaagactcatgtgctcgttgtcgaataccgcgcaggtgtacgtcatggaggggccgaggaagtcggcgtagaactcgttggacatgtcgtagtggaagctgacggtttccgaatcggccttttcggtgtgcggcatcaggccacgcttgatgcgggcgaacttgctcgggccctcggtggcgggcaccggcggcttcttgaagccgtgactcagaatgccggcggatacgcgggcaatggatgcgggagcgagcgggcgaacgtatttggccagcgacaccagcttgcgcatcgccggatacgggtcggcgtagtcaatgccgtccacgtcgaaatcgcccagaatgtatgcgcgcacgatgccgatttcattcgggtgcgcgagcagctggtacatgcagttcggcgtggcgattttgaccttcaaatccgcgtctgccgggccgaaatgcgagccgtcaaaagcgtcgatacgaacgggagcgtcggggtcgagaaacagggatgccatctcgccgaccgtcatagccttgccatttgccattatctgcctcattctcttatgatgatcaccccaattgtcgaggtatcttagtcctcttcaggagactgaaaccgttgaatacaccatctggtgaaccagttcgcgttcggctgatgaaacacgaatggaattaggcatctcgcatattgattgtgtacgcgcgaagtaagcagataagagacgagtttctcggagagcaccaagcgactccggaaaatggtcttatcgttgagatctcgggcgattgaactggtttggtcaatggacaataattcgacaagtgcggaattccgccatttcttgccattattttcagtgttgttctttcagcgtgttttcaggtgaatgctcatgcgcggagtagactggggaaccgttggaccactcaaagagtgagtggaccaccagttaagacactagctcaaaaggagagtccctatggtataccgcatgattttcaaccagactgcatacttcggacgtggcgcgatcaaggaaattccggccgtcgccaagcagcacggcttcaccaaggcatttatcgtcactgatccggtactgctggagaccggcaccgccgagaaggtcaccaaggttctggatgaggccggcctgccctacgaagtgttctccaacgtcaagccgaacccgccggtagagtgcatcaaggacggcgtcgccaagttcgccgagtccggtgcggacttcctgatcggcctgggcggcggctccccgcaagacacctgcaagggcatcggcatcatcaccgccaacccggagttcgccgacgtgctgtccctggaaggcgtcgcggataccaagaacccgtccgtcccgatcttcggcgtgccgaccaccgccggtaccgcttccgagacgaccatcaactacgtggtcaccgataccgccaacaagcgtaagttcgtggctgtcgacccgcacgatatcccgatcgtcgccttcgtggacccggatctgaccgactccatgccgcgcggcctgaaggttgccaccggacttgacgccctgacccacgccatcgagggttacattaccccgggtgcctggagcctgtccgactgcctgtccatgcagaccattcgcatgattgccaagaacctagccaagtccgccgacggcgacattccggctggcgagcagatggcgtacgcctcctacatcaccggtatggcctactccaacgtgggcctcggcctggtgcacggcatggctcacccgctgggcggccgtctgggcgtggcccacggtgtggccaacggtattctgctggccccggtcatggaatacaacaaggactacacgggcgagaagtaccgcgacatcgccgacgcgttcggcgtcgaggacgcctacaccggcgacctggagaaggtgcgcgaagaggccgtgcaggccgtccacaagctgaccgtggatctgaagaacccgaccacgatcagcgaggtcggcgccaccgaggctgatctggaaccgctggcccacgacgccttcaacgacgtgtgcactcccggcaacccgcgtcaggccaccgaagaggacattctcgcgatttacaagtcgctgatgtgatcagtcgatgacggtaaacattagctccctctgatgagggagctgtcagcgtggctgactgggagagaagttgcggcgtagccgctgaataataggtatcggcctgcggccgattcaatgttttagcggctgcgtcgcaatctctccctcagtctcacttcgttcgacagctccctcatcagagggagcttgcataagcagagggggctcgtatatccagctacttttcgtgcttttcgtcgtagacttcgtcggtgggggtctcgtcgtacagctgcttgccttgcgcctccgccagtttcatctgctcgttgatccacgcggcttcagcaggattgatatccgcggaattcagcactttctgccacaccgggtagaacatatgcatcgccggatacatggcggtgaacaacacctccggcttatgcgtgcgcgtatgttgcggatgcgcatcaaacgtattcttaaaacgtcgcatgtagttcaggaatgaactcagcgacgtgtccatccgtcgcgcgctcatcgcggcgatcatgcgcggcgagtacacggttttcagattcttgcccatcagatgcagggaaatatcgatatcctcgtgcatcacatcggccttatctcggcagacctcattcgcggtctgatgccaggccgaagcgcgcaaggccatattcgagccgaacagcagcggctggccgccatcggcacggtagattcgcttgcgtaaggaattgtcgcctttcaacccgaaatgacgtgagggcatgtcgtaatacatcaccggaccagtggcacccatcgcggccgggtcttcggtgaagatgccggagaccacctccacccagtcaggccggatcatacagtcggcgtcaaaacggcccagcacatcgccggtcgcggcgttcaggccaaagttgcgggtgggaatcagcccctgttcatcgttctggtgcaacagtttgaccggggcctcgggatgttcggcgatgaactgttcgacaatcgcgcaggtgttgtccgtagaacgattgtccaccaccagcacctcatgcggcatgatggtctggcgagtggcgttcagcagacagtcgcggatgcgttcggcttcgttccacgctgggatgatgatcgaaacgttgagcataacatcaacaatagaaaagcgggtgtacgccgccggcgtatccgagcttcaaacccctcgctacaatggggagccatgagcgaacgcgtgcgaaacataaacagcaccgacacgtcgagaagcggtgccgcagaagccggggcagacccggacgacgagaatcgtatcgactttggtactttgttccccgccaagggagattcccgcaggccaccggaatggttcggccgcgcgctgctgtatgtggccctcgccgtcatcgtattcatgttctgctggcgctcgtggggcgacatctcctatctggtgttcgacatcatcatctcgctgttcctggcgctggccgtcgaaccgctggtggtggcgctggtggctcatggctggaagcgtggcgtggcttccgccgtcagtctggtgggcgtggccgtggtcgtgggtgtgctgctcacgctgttcggcaatatgtttgtacagcagatgattgccatggtccgcggtttgccggcaatgtatgggcagattcgtgagttcgtggaccagcacgccacgttcaagatgccggaaatcagcaatcttggcatggaaatcttcaacaatatccagacctcgtgggtcaccgatttcgccggcaccgccatgagtacggtgggtggcctgttctccttcctgctgaacctcatgaccgtggtaatgaccacgtattacatctccgccgccggcccaaagctgcgccgctccttctgccagtggctggcccccaacacgcagcgtcgattcctgctggtgtggaccgtggcccaaggccagatttcgtccttcctgttctcccgttcgattctggcgctgatcaacgccacctgcaccgccatcttcttggagatcctgcatgtgccctactggctgccgttggccctgttctgcggcgtggtatcccagttcatccccacggtcggcacctatatcggcggtgcgctgccggtgctgttcgcttggggcaaccgcgggtggacgtacgccgtggcggtgctggtgttcatcatcgtctaccagcagatcgagaacctgattctctcgccgaggatttcgcagcgcacgatggatatcaacgcggccgtcgccttcctctcggtgctggcgttcggctcgctgttcggcgcattcggcgcgttcctggcgctgccggtcaccgcatcgctgcaggccatcttccgtgcgtacaccaagcgctatgagctgattgactcaccgctgatgaacgatccgactccggagaagaagtccaagatcgtcgaggcgtccgaggcgttcggcgagcacgtattgcagccaatcggcgagcacatgccgcgtgcggccaggggatccaccaaccgcgtgccgatgaacgaggaactgcgtttgctgcaggaacagatctatgcgattccgtcgcacgagacgaaagaatccgatttggacgattccgccaccgtggcgattccgaagaacgtgctatcctccagcgctcgcaagggattacacggcactgagccggagtcggatgccgatgataccgataacgccgataatacagtcggtgcggatgcaagctttgatgagccggatacggcggcgattccgcagcgtggtgccgcggatacgcagcagtctgagcggcccgagcagcctgagcggtccgccgaacagcctgagcagcccgagcaacgcaagcaaaccaagcagtctgatcaatctgcctccagcaatcctagggcagggtggcgctgatgactctgctttccgtactcgatattcttctgatgatcgtcggcggtgccggcatgatatatcagggactgtgcatcgtgatgtccctgttcgccaagcccgtgcgcttccccgacgccccgatgaccaaccggtatgccgtgctgatctccgcgcgcaacgaagaaaaagtgatcggcaaccttattgggtcgattcgcgatcagacctacccgtccaacctcatcgacatctggctggtggccgacaactgcaccgacaacaccgccgacgtggtgcggtctttgggctgccatgtggtggaacgccacaatcttgagctggttggcaagggatatgcgctgacgtatctgttggggcatatgctcgacatcggtgtggccgatgattatgaggcctacttcgtgttcgatgccgataacaagctggacaagcactacttcgaggaaatgaacaaggcgttctgctccggattcaagattctgaccagctaccgtaattcggtgaatctggcggataactgggtgtcttctggttctgcgctgtggttcatccgtgaatcgcgattcctgtctaactcgcgtatgattctcggttcctcttgccatgtgggcggtacgggattcatgttctcccgcgaggtgatgaagcggaacaagggatggaagttccatctgctcactgaagatcttgaattcactatggattcgattctgcatggcgaccgcatcggctattgcggtactgcgattctctacgacgagcagccggttaccttctcgcaaagttggcgtcagcgtttgcgttggagcaagggattcctgcaggtattccgttattatggctcggcattgctgaaacgcgcggttcgcgaacgtgatttctcctgcatcgacttcaccttgatgctgtgtccgtttaccgtgttgggcgtgattcgcgcggtaatgggcttgctgttcgccgcgtgtggcttcgtgagttggccgagccagctgcaatcgctggccagttggtccagtggcatcatcatatcggtgttgggcctgatggcattggctgcattgaccatcattgtcgagcgcgaccagatcggtgccacgaacaaggagctgctcgcctatgtgctcagcttcccgatttacattctcagctacgtgccgatctccttccaggccctcttctccaaagcccagtggaagcccattgcgcataagggttgaccgagtccgctagtccggagccgctcagcggggcaatccaacagcaacccgggggtttgcttcgctgagggttggctggtggggtagagtggatgtatgagcttagacaatactcaaaggaatgtcggatttcagccgccgatgatgccagctgccgcccccgcgcctgcacagccgtcgcaaccgcagccacaagcatggccgccgaatccgaatgcggcggtgtccattcgtggcctgttcaagcacttcgaccggaagatcgccgtcaacggactcgcgctcgatattccggtcggctcgttctatggacttgtaggccccaacggcgccggcaaaaccaccacgctcaatatggtgaccggtctattggtaccggacgccggcaccgccatgattttgggccatgacgtgtggagcgacgtgaacacggccaagcgcatgatcggcgtcatgccccagcccgaccagatcctcgaccgactgaccggtttgcaattgctcgtctactccggcatgctgcgcggcatgagccgcgatgagaccacgcgtcgcgcccaggacctgctcaatgctttcgacttggccggggccgccaacacgatggtcaccgattattcggccggcatgaccaagaagatctgcctggcctccgcgatgattcatagcccgcgcattctggtcctggacgagccgtttgaatccgtggacccggtgtccagcgccaacctcaaagacatcctcatcgaatacgcgaagaccggcggcacggtgattatctcttcgcacgtgatggcattggtcgaaaagatgtgcacgcatgtggccgtaatcaacaacggtctggtgtgcgcggccggcacggtggacgaggtcgccgccggcgaagaactcgaagaccgcttcctgcaactggtcggcggccgccacgaagccgcccatctcgcatggctcgacggcgggcaagcccaagcccaagcaccaacttcggtccagccggtccagcccattccgcttacaaccgccacgcccgccacacccaccgatgaggcccgccgatgatcagcagcgccatcaccctggtccgcctgcgctggacgctcacgctcgccaccctgcgaaaatcggcgtggcagaccgtcgcctatgtcttttccgccgtactcgcggccggcaccatcatcggcaccggcgtgctcgcatggttcatcggcatactgccgcccttcaccgtgaacgcggatggctttccgctgaacatccttggttccggaggcatcgtcaacatagtcgtcgtgctggtcggcgcgaccatgaccatcttcatcggcttcatccagctcatgatgcttggcgaaggctccaccatgaacccacgcaaattcgcgctctacggcatcgccgaccgcaacctgcaattcggcttgctgctttccggcctgtccggcatccccgcccttaccggcgtggcctcactgatgctctggacactggcctatcggcatatgggaccagccgtaatcatcagttccctcctcgccgcagtgctggccgtcatcaccatgatgagcatctccaaactgctcatcgccctatccaccacgctggtgaccagcaaacgcggcaaaggcgcgttctatatcttcatcgtgctgacgttcgttatcatctgtcagttgccgaacactctggtcaactccggcgtggccttcagcctcaacaccgaaacctggggcgcggcgaccaccatcgtcgcatggacgccgttcggcgcggccttccaactaccgttcgacgcgcttaccggagcctgggcggtgctgctcgcccgcatcgccatccttgccgtcacatggattgtctgcttcgccgtctgcacctggtgtctgagacatgaacggctcaccatcggcgcaaacagtccgtccgagaccgccaaaggcatcggcgcattcgcatggatgcccgattcggcatccggcgcggtttccgcacgcctgatcacctatctcaaacgggacccccgccaagccatgaccttcgccatgccggtcctgttcctgatcatcttcgccttccaggcacacggcatcagcgcggtcgtctggcagtcgctgatctggtgcggctggttcatgtccgtcgtggaaagcaacgggctcgcatatgacggccgcggcttcaccatggaagtcatcgccggcgtgcgtggccgggccgacagaatcggccgcgtacgcgtctacgtcggcatcatggtcgtctacatggtgctgctctatctcgccggcatcgtgctggtcggcgcactgaccggacgctgggcgcagcccgatgacctcgctaccggcctgatcttcctcgccacgggcatgggcatcgccttgagcggactgggcgtggccgaagtcacctcctgtgtactgatgtacccggtcgcctcaatggacaagccgttctccgcgcctcaaggccgcgccatggcccaaggcttcttcccgttcgtctacatgcttggcagcctgctgctcatgctgcccactggcatcgtggcgctggtcatgctgctgacaggagccgaaggcggcatgtggctggcgattattccggtcgcgctggccaatggcatcggcattctggcactcgggacatggctgggcggtaagctgatggatgcgcgaatgctctcgattgtggcaacactcgactcgttcgcctcattgcagaaatgattgccttggcataaggagcacgatggtatctacagcggtatcacgccgccagcgacgtgaagcgcaacggcggacccaacgatcgcatcgccgaacactgaccgtcatcatttccgcactgaccaccatcgccctgttcgcggggtactgcgccgccgacatcaccgacgtggcccccggattattgacgttgaagcccgtcaccgcacctgttttcgccaatccggccaccgccaaatcaggcggcaccatcgccggtgccctgaacgcgaacaaggccattgattccacggccgcttctgcactggtcaacgaattgctgtccacgcaaggcgtgggaaacgatacgtcggtgatcattgaagacgcccaaggcaccgtcgctgccgaacatgagtcgaacactccacgcgagcctgcatccacactgaaaacgctgaccgcgctcgccgcctcatccaccctgaacatggcatccaccttggatacccaagtgttcctgacccaatccgatgacggcgccaatacgttgaccctcaaaggcaatggcgacatgctgctgtctgcaggcgattccgacgcaaaccataccaacggacgtgccggtctgaacaccttggccaaggccaccgtggccgcgctcgcccagcgaggcatcacttccgtcaatctcgagtacgacgacaccctattcggcgactcacgcattcccgcaggtctgtcggaaggcggcgcggtcttaagcgactacaccgtctacttcacgccggtctcatcaatggcgattgatggaggccgccaatacaccgccgatacgcctgcgccggccgaccctgatgattcggccggatacccggaactgtcccagcacaccgccagcgacgtggccacgaaattcgccgaactgctccaatcgaacggtgtggccgttaccggagacgtgacggcaaacaccgctccatccggcgaaacgcctttggcttcggtgagttcggcaacactgtccgaaatcatggcatacacgttacggcattcggacaatacgctggccgaggagttcggcagactcaccgccttggcgaaatcagcgacaaacagtcctgaaggcggcacggaagcggtcaaatccactctgaacgatctcggtctcgacacatccggtctgaccatggccgattgctccggcctgtctcccggctcccggctcaccgtacgcacgctggcggccgtccaacaacgtaatctgaccaccgagagcggtgctgctggtgcggaaggtctatccatcgcggggttggtgggcacggcgcaggatcggtatacggatgatgccgtggccggtctgctgcgcgtcaaaaccggcagcctcggcacggtcacgtcgatggccggcaatgtgtcccgtaccaatgggggagcgttgtcgtttgccgtggtggtcaacaatcctgaggattatgccgccgcgcgtagcgccatcgactcgttcatcaccaagctcgcggggctgtaaaagaggcatcaagggccatcaagggctacaaaggccgtaaacgtccataaacgcacgagtgcctataaccagaaaagggtggtgagtacatggcatattccgcacgattgcgcaaggccgtaggcgcggtccgaacaacgctgagcgccgtggaactatgcgatgtgcaggctcccgaattcgcgcagcatggggaccatgccgttgcctccgatgcaccactcgtgctcgtggcctgttcaggcgggcgcgattcgatggcgctggccgcggtaagccatatcgtatgcacgtccatgggcgtgcgttgcggtgtcgtgattgtggatcacggcttgcaggagggttccgaacaggtcgccggcgaggccgcggatcgttgccgtgcgttgggactgggcccggtcatcgtgcgcaacgcaaccgtgcaggcacgcggtgagggcctcgaagcggccgcacggcaggcccggtacaacgagctgtgcgccgcggcgcgtgaatcaggtgccattgccgtgctgttggcccacactatggacgatcaggcggaaaccgtattgatcggactgctgcgcagccgtggcgtggatgcgttggccggcatgccgcaggtcttcacacgcagtggcgtgacttttgcgcggccgctgctgacccttactcgagacgaaaccaccggcctctgtgaagacttgggtgtggaatattgggatgaccccaccaatggcgatgcggtagacggcgagttgccggacgactatccgttgcgctcgcgggtacgccacgacctgctgccggccatcgagcgattcgctggattcaatgtcgcccgccatttcgctgaaagcgcacggttggccagaatggataaggagtatctggatcagcgatccgacgaggtgatgggggaggcggttacgacagttgattggccggcatcgtcggcagcggtatcgaccgatacgccacgagcctgtgctgcagacgataccaacgattcgggccatggcatcggcctgatgatcggcgtcaaacgtattgcacgtgagccagaggcgattcggttgcgggtcatcgctcacgcgctgagccaggccggtgtgaacgccagtgccgcccagattgccgccatcgaccggctggtcgtcgattggcatggccaaggcggcgtatcacttcccagaggttattcagccaatcgcaagaaacacgtcattcgcgtgtgccaagatggagcgcatgcgaatcgctgacgttgaggaagatattgaccacgagctggtcagcaaagaacagatcgatgccaagatccacgagatggccgctctcgcgagcgaggattaccgcgataagaatccgctgctcgttgcggtgctgaaaggggccgtgaatacgctggtcgcgttcacccaggccatgagcattcctgtacagatcgacttcatgagcctgtcgagctatggctcgggcacagtgtcgagcggtgaggtcacagtcaggcaggatttgtccgccgatgttcgcggacggcacatcttgattgtggaggatattgttgattcaggacgcacgctcgcgtggctggtcgcagaactgaaacgtcgtggtgccgcttccgtggaggtcttcgctttgctgagcaagc

SEQ ID NO: 2969 - DNA, 4867 bp, Unknown
  R19_24m  MAG No. k141_8968
cgtgccaccatgcgcggcatcacggtcggcgtgttgctggaggtgaacgaatccggcgaggaatcgaagtccggctgtgcacccagccacgccatcgacttggcccagcgcatcggtgcgatgggcggactgcgcttgcagggattgatgaccattggcgcccatgtggatgatgagcgcacgattcgtgcgggcttcgcgcatctgcgccgcacgcgcgaccagattattgcctccggtgccgaaggcacggccgactgcaccgaactgtccatgggcatgacccacgacatgacctacgccatcgaagaaggctccaccatcgtgcgcgtcggcaccgccatcttcggcgagcgcgccttcatctgattggagctatacgaaaaaacgccgcttgatcaatagccaagcggcgtttttcgtaaggattttcggcgtatcaatcacgcatagatattgcgcggacgcatgtcctcgggcaggccgtcgagcagaatcgccacggaaccttcctcgaacacggagcgaatacccgcggccagcagcggtgcgcaagacagtacggtcatattcggcaggcgcttctcttcgggaatcggcacggtgtccataaacacgatttcatgcgcgccgcagtgagacaggcgctccacggccgggccggagagcaggccatgggtggcgaccagcgtcaccgacttggcgccggattcgttcagggtgcgcacggcttcgcagatagtaccggcggtatcgaccatgtcgtcgatgaccacgcagtcgcggccgtcgacatcgccgataatgccatgtgcctcggcatggttcggacgagtaatatcacgctgtttgtggatgaatgccagcggcagattgcctagcttggcggcccactgttcggacaccttgatacggccggcatccggggacacgatggtggtgttgcccagatcaagggtggaacgcacgtaatcgagcagcaccggcatggcggttagatgatcgaccggaccatcgaagaaaccctgctcctgagcggcgtgcagatcgaccgtcataatgcggtctgcaccggcggcgtggaacagatcgaaaatcagacgggcggtgatgggctcacgaccgcggtgcttcttatcctggcgcgagtagccgaggaagggcgccaccacggtaatcgacttggcggaggcgcgcttcaaagcgtcgatcatgatgagctgttccatgatccacttgttgatatcgcccgaatgacactgcagcacgaacacgtccgcaccacgcaccggttcggtgaaacgcacgtacatctcgccattggcaaagtcataggacgtggtttcgaggatttcggttcccaaacattcggccaccttctcagctagctcggggtaggcgcggcccgtgaccaatacgagtcgtttatccggagtgccttcaagaatcgccgacatgcgttcgcatcctttgtttgagtcgctgtgtgatttacgccttaaccagtgtacaagcaccccgccgcagcgaacgccacggcggggtgcctatttcgtaagagtgttgagattgccgaaattattcggagaactcgacactgaccttattgtctttgatggtgaaggtgccgtataccgagaaagtgctggaatcgtcttccggttcccagccatcgctgtaacggtactcgtaattcgccgtcacatcaccttcgtcggtgctgaacgagctatccgacaggctcacgctggtgaccttcggataaccgtcaatcgtccacttgaagttgcggtatcggctggaattggaggtgtagtagccgaacgggcagccctgcggttctgcatcggtggaagccgcgcattcatccagcttgctcttcaccgccgtgtcgatttccgacgtcaacttgtccgtaggctgagcgtcaagagtgccgctatcggagctgttggtgctcagagacacggtcttggcggtgtaatagtcggacttcaccacgccaactttgtagacgccggggtacaccttgagccggtagttgccggtttcgtccgcgtcgttgttcacggcgttcttgggcgttacggtcacgccattgacggtgatgctgcccagcgagcttggcgcatataccgaaatggtcttgaccaacggttcggcgacggtccagttcttgaagatcaggaacttgctgccgttggccaccatcttgatggaatcgccggtgacctccttgccttcaagcgtgtacgtcagctgggcactcacggtgccatcggcattgttggaagtctgcgagatgcgcgcgttggtgatgtgcgtgttctcgcccgaggatgccttgctggtcagcagtgcgcgctggttcgtatccacgtgaggatcggcgatggtgttggccttgtcgtagtcgccggaggagatggcggccacatagctgttcgccacgctcttcgcgctgaacacggcggaagacagcacgccatacacgataccgaacagtacgaggaagccggccacggcaccaacgatgatgaagatcttcttctgctgctcattcatggtggtggaggtcgcgccaggtgcggctaccggtgccgctccgggagtggtgggagccgcggttgcgaatgtggtgcccggagcaccgggggttgcaggggcggccggagcacccggggcagcgggcgcgggtacaccgacaccagcaacaggaggctggccggcggacgtcggcgtgacgttgacgtgaggctgcgcagcgtttgcgcccgtacccacgccggcgcttggcgtgccccacgtgggccacttgccgaccattgcgccgctggcatagatgtagtcgaccacaggctgaggcgtggcacgcacagtgccgcctacaagtagggcccgcagtcccggcatggaaaccaccatggtcgggccgaacgtcagtgcaacgacctcaaccaggaatgcccacaggcccatgaccaggaagtaccacatggcaggtccggtggtctgaacttgcgtgacggaggtgcggttgcccatagtacccatcagcagcgtggcaatcgcccagaacaccatgatggcgatcggggctttccagcagtgctgccagcccatgtaggcacggtcgtacaggttgcgtgcggagacgcgcaatgccgtgtagaaggtgaggaccaggaacacggcgaacaggatccaaataggccatacggtaacgctgaggttgatgctgaacaggctgagatcctgcggcagctgaccggactcggtcagtgtaatggcgccgaaggttccccaggtaaagaagaactcgccgatcatcagcagtgtgaccgggaacgtcagtatcaggattccctgacctgaggagaatgccacggcgaacagggccaccaggccgacgatgaagagcaaagccagctggaagctcaagacgctgaccaccgtgcgcgtgtatccgcgaacgcggtgtgcccactgccaagtagctccgaacacattcttggaatcggaagcatattgggccagtgcatagccggccagagcgccgagcgcggagagcaggtaggccataaagaacgtacgcactgtggcgccggtcaccttggccacgatggtggtgccactggcgagtggtgccgccgcgatggccgcaagcagcgtgatgaccacggccggcagcaatccggtgataaagccggagatcaggccggtgaacttgaatcgaatgctcttggaacgggccagcatgaatgcgccgaatgcggtgccgaccagcaatgccaagccggtgagccccagtgggtacgacatcatgttgctggcgtccatgctggaggatgagaggtcgacgatgtcgaaatgaataccgccagacaggcccatgaccaacgataggaacaggtagtggaagaagttcatgccgttgccggtgatgaacatgccgccaacggcttggttcagtgttgaatcggccccgaggctgggtgctgcggtgctcatggaattcattgcgattgcagggaaaatcgaaagcaccaaggcggctgccgtaccgatgccggccgcaatgccgatggtctgcatgttgggggcgccgaacagttccttgaccagtgggctggaagagatgggttgtgccggagcggcgggagccggcgatgagccgggctgccctgggttcggaatggccgtggtcggtgcggtgaatgccggtccgcctgcgggctgggcctgcggctgtgcagcgggctgaggcgtcggctgcacagccgctgcgccgggcaacggaatcgatggtgcgggagccgcgggctgtgcggtcgtgggaacggcgccggtgggttgaccgggcgtgggtgcggcgggcgtcgctgctgctggagctgacgccgcggcaagatggttgccgcaggaaccgcagaattgcgctccttcgcgcacagctgcgccacaattaggacagaacatatagtccccctttcttctgatgcttcttcgagcactatcgtacccgcaaaatcagcgccatgaccatagggcgaggctcgaaatggacaatactgggtgatggcgcgcgggcttggctgcgcgggcttggccaaaatggtgggcatcgcgaaaccggcaggaatatggccataccctgtcccgccttatatatagactgtccaagttgcccgaagatgcggtgccggtttggtgctgcgtcatgggctaacacgcatacacactcctgccacggaacgtccgtggccgaatagtccgaaggaggtgggtgatgtctgcgcacaagtacgaactgatgttcatcgccgatcctgagctggatgagcgcggtctgaagaagctgaccgag

SEQ ID NO: 2970 - DNA, 9149 bp, Unknown
  R19_24m  MAG No. k141_9036
aaaccgttgaggggcaaccctccgcgagttcgaatctcgccctgtccgcgaaccgaggcctgggcaacatgcccaggccctttttctttttctggaacctgtcttcttgatcgccaccggggtgctgatatattggtttgtaatgccgtaacatgcggtgtccccgttgatatgacgggccaatcggcgtgagccgataagaaaaggcccgacgtttgcagcatcgggcctttgcgttgattaccggcttgcgcctttaatcaacaaggttgcaagatgaatcatatcacgatgcacggtagtctgaccgtgaacgggcgcaccgtgatcgtccatgtgggcgatggcgaggtgaacgccacggttgacggcacgcacttcaacgtgcgtagcctgtggcagctctaccagttgctgagactgctcgtgtagcgtctcattaaggcgcggtgcccccctagtcgggtatcgcgccggcaacctgaaaaccgataatgttggcaagtgcttgcaatttgtggtggacgattgcaagctgacgtcttggattgttgccgctatccaatatctcattaggtctaccggtggaccaaaagtacgttgctttgtaaggggagttaatgaaatgaacaaacccgcacaatcgagcatcgaatcggtttaatgccactcacctcaacgggacgcgcggtaattgttagctaagttgacaataaaagagcaaaggcctaaattagcaatcagtcatcacgctgaggtgatgatttcactaggaaggagtagagatatggtatcgcacaacaagcgcatcgtggctgctcttgccgcggtagcagcaatgggtattggtttggccggttgcggcggcagcgacactgccggcgacacgaagtccggcagcgatggcggtgtggtcaacatcacctatatgcatcgtctgcccgattccgaaggcatgaccttggtcaacgacattgtggccaagtggaacaaggagcacccgaacattcaggtcaaagccaccaagttcgatggcaatgccgccgacatgatcaagaagctcgagaccgacgtcaaggctggcaatgcgccggatctggctcaggtcggttactccgaggttcctgaggtcttcaccaagggccttctgcaggatgtcaccgatgaggccgccaagtacaaggacgatttcgcttccggcccgttcgcactgatgcaggtggacggcaagacctacggtctgccgcaggacaccggcccgctgacttacttctacaacgccgctgaatttgagaagctcggcatcaccgtgccgaagaccgctgacgagctcattgagaccgccaagaagaccgctgcccaaggcaagtacatcatgaccttccaacctgatgaggccatgatgatgatgtccggccaggccggcgcttccggtccgtggtacaaggtcgacggcaactcctgggttgtcaacacccagactaagggctccaaggccgtggccgatgtctaccagcagctgatcgacaacaaggccgccctcaccaacccgcgttgggatgcatcgtttgataactccatccagtccggtcagctgatcggcaccgtggccgccgcttgggaagccccactgttcatcgattccgccggtggcactggtgctggtgagtggaaggtcacccagctcggtgactggttcggcaatggcaccaagaccggcgccgatggtggttccggtgtggccgtgctcaagggttccaagcacccggccgaagccatggagttccttgactggttcaacacccaggttgatgaccttgtctcccagggccttgtcgtggccgccaccaccgcggatgccaagaccccgcagaagtggtccgactacttcagcggacaggatgtcatggctgagttcaagaccgcgaacgacaacatgggtgacttcacctacatgcctggcttctccgcagtcggcgctgcaatgaaacagaccgccgccaaggctgccgatggttctgccaaggtttcggatgtgttcgacaccgctcagaagacctcggtggatacgctgaagaacctcggtctgtccgtcaaggagtgacctcactaggtcttgtcaacgggccggcttgaaatagccggccgtccaagacctccgatgcctcgcatcaccatagcgaaaggccggggcacatactccggccttccgtattgtttgggggtattgctgcaggggcgctgtggcccttgtcatttgttttactgttctttgcgaagacaggttttgtattatgactgcatccactactcaggcgaagggcaaagcacctaggcgtgccgccgccaagccgaagcggtccggcgctcagaagcgcgagaaccgcaccggctgggcgttcatggcaccgttcgccgtcctgttcactttcgtgttcatcttgcccatcatctgggccatctattccagcttcttccgtcaggtcaccgagggcggtggcgcatacggcggtggcgagctggtcaataaattcgtaggattccagaacttccagtatgctattacttccggcaacttctggtccggcgtcggcagggtgctgctctacaccctgattcaggtgccgatcatgatcatcgccgcactggcgttggccatcgtcatcgactcgttcgtggtcaagcatgtcaccggtttccgtctgggctacttcctgccctacgccatccccggcgtcgtggcctcgattatctgggtctacctgtacaacggccaaatctcgccgatcgtcaagggacttgccgccatcggcgtcaatgtggacttcttcaacaagaacatcgtgctcggctcgatggccaacatcaccacatggaccttcaccggctacaacatgctgattttccttgccgcactgcaggccatcccgcatgacctctatgaggccgcccgtatcgacggcgccaatggttggcagattgccacgaagatcaagctgccgaacgtgcgtggcgcggccctgctggccatgctgctttccatcgtcggcaccattcagctgttcaacgaaccgcagatcatgtctacggctgatccgggtatttccaagtcgtatacaccgatgatgatggccatgaacacttctcagggcaccattaccccgtctggtgacggtccggcctcggccatcgccattgtcatggctctgatcgcaggtgtgcttgccgtgctgtacaccttggccgaaaggaaggtgaacgagtaatgagctccgcaaccgttgaagaacgcgcccgcaaaaaggccgagcgcaagctcgaaaagcagcgtcaggctgcgcaacacgatttgcctcgctccatgcgaccgtccgcggccgtgaagaccctcaccgtggtgctgctggtactggtgttgatctacttcctgttcccgatttactgggccatcatcgcgtccaccaagacgccggcccagatgaccggtagcaacggcatgtggtttgctgtgccgcttgaccagctgcccaatgccatcgccactaactattccaagctgcttggctggactcgtggcaacttctggcgctgggtgctgaactccctgatctactcgggcgtctcggcattgatcggcaccatcgtgtctgtgatggctggctacgccaccgcaaaattcaacttccgcggcaagaacgcggccatcggcatcattatggcctgcatgctcatgccgtccgccctgctgaccatcccgatgtactcgatcttccacacgttgcacctgaccaacactatgctctcgatcatcatcccgtgctgcgtttcgccgttcggcttcttcctgggccgcacgtacgcacagagttcggtgccggacgaactgcttgaagccgcccgcatcgacggcgcgagcgaggcgaggatcttcttcaccatcgtgctgaggctcctggccccggccatggtgacgattttcctgttcctgttcgtggccacgtggaacaacttcctgctgccgttgatgatggtgtcttccgacaccttgaagcccgtgaccctcggtctgtacggcatggtctcgctggccacgttcaccgatcgcggcgccctgatgatgggtgcgttgctcggcgtgctgcccgtgatcgtgctgttcctcggcctccagcgctactggcagtccggcctcgccgccggtgccgtcaagggctaaccaatccgctgcccggcatgtcgtgtcactccttccggtgccgggcaacgtccctcccatattcagtgacacgattccaatcgtccggcgtcaccgtaagcgtcaaggatctacgcagtcagggtcccagggcccgcgatgacgccggtcattttgtatgcgacgaattcgtcgctttgtagttttttgatgaccaaccccacaaaggagcactcatgaccagcaccggccgcttcacgctgcccagtgaagagaattttgccgaaaagaccaaggaactcgccgaattgtggggtgcggacgccatccgcaactccgacggcacgcatctggacgaggcagtgctcgctcttggcaagaaaatctacagcgcctacttcccgacccgcgcccacaacgagtggatcaccctgcacatggacgagaccccgcaggtctacctgctgaccgcccgtatcctggccgagtccaacgcggtggatgtgccgctgatggatggtttcttcgaggaacagctcaagcctaaccgtgacgccgaccctcataagtactgggaagtcgtggaccgcaccacgggcgaggtcgtggacccgtccggctggacgctcgacccgggcgaggacaccgtgcacgtgaccgctgccgtgccgatgcacgaatacacggtgagtttcctggcctacatcatctgggacccggtcgagatgtacaaccacctgaccaatgattggggagacaaggaacacgagattccgttcgacatctaccatccggccacccgcaagttcgtgttcgatacgttcgagcagtggctgaaggacagcccgcaggtggatgtggtgcgtttcaccacgttcttctaccagttcacgctcctgttcgatgccaagcgtcgcgaaaaggtggtcgactggttcggttgcgcctgcaccgtgagcccgcgcgcattggacgatttcgagaaggagtacggttaccgtctgcgtccggaggatttcgtggatggcggtgcctacaactccgcgtggcgcgtgccccgcaaggcgcaacgcgactggattgacttcctctccggattcgtgcgcgagaacgtcaagcggcttgccgacatgtcgcacgcggcaggcaaggaagccatgatgttccttggcgaccagtggatcggtaccgaaccgtataaggacgggttcgaaaagctgggtttggatgcggtcgtcggctccatcggagacggcaccaccacccgcatgatcgcggacattccgggcgtcaaatacacggaaggacgcttcctgccgtacttcttccccgacacgttctacgagggcaacgacccgagcatcgaaggcctcgacaactggcgtaaggcccgccgcgcgatcctgcgttcgccgatcggccgtatgggctacggtggctacctctccttggccgccaagttcccgaagttcgtggacacggtgacccatatcgccgacgaattccgcgacatccacgaccgcaccggtggggtggccgccgaaggcgagctcaacgtggcgattctgaattcctggggcaagatgcgttcctggatggcgttcaccgtggcacacgccctgcccaacaagcagacctactcctactacggcattctggaatccctgtccggcatgcgcgtgaacgtgcggttcatcagcttcgacgacgtactcgcgcatggcatcgatagtgatatcgacgtaatcatcaacggcggcccggtcgacaccgcattcaccggcggcgacgtgtggaccaacccgaagctcgtggaaaccgtgcgcgcctgggtgcgtggtggcggcgcgttcgtgggcgtgggcgagccgagctcggcaccgcgcttccaagcgggccggttcttccagctggccgacgtgattggcgtggacgaggagcgctatcagaccctctccgtggacaagtacttcccaccggtggtgccggaccacttcatcaccgccgatgtgccggtcgacccggcggcccgcgaggcttgggaacaggccggctaccgcatcccgctgagcggttgcggcggtggccagtccatcaagccgttgggcggcatcgacttcggcgaacccgtgctcaacacgtatccggtcaatgaaaacgtgaccctgctgcgcgcggacggcgggcaggtgcagctcgcgaccaatgattatggcgaaggccgcggtgtgtacatctccggtctgccctattcggcggccaacgcccgactgctggaacgcgtgctgttctacgcctcccacaacgaagacaagtatgcggcttggagctcgtccaacccggagtgcgaggtggcgcacttccccgagcaagggttgtactgcgtaatcaacaacaccgatcagccgcagcggaccacggtgactctggccgatggcaccaccgaggacttcgacctgcccgacagcggcatcgcatggcgtgaagcctgattcccgcgttttggagaacggacccatcatgaccgaaagcaatgaagttttattcggcatcgcctcgcattttgcgctggaaggtgccgtgaccggcatcgaaccttacggagacggccatatcaacaccacctatctggtgaccacggacggcccccgctacatcctccaacagatgaacaccagcatcttccccgatacggtgaatctgatgcgcaatgtcgaactggtcacctccactctcaaggctcagggcaaagagacgctggacattgtgcccaccacctccggcgccacctgggccgagatcgatggcggcgcatggcgcgtctacaagttcatcgaacacaccgtgtcgtacaacctcgtgccgaacccggacgtgttccgcgaggccggcagcgcattcggcgacttccagaacttcctgtccgaattcgacgccagccagttgaccgaaaccatcgcccgcttccacgacaccccgcatcgtttcgaggacttcaaggccgccctcgccgcggacaagctcggccgcgccgccgcatgccagccggaaatcgacttctatctgagccacgccgaccagtatgccgtcgtgatggatgggctcagggacggttcgattccgttgcgcgtgacccacaacgacaccaagctcaacaacatcctcatggacgccaccaccggcaaggcgcgtgcgatcatcgatctcgacaccatcatgcccggctccatgctgttcgacttcggcgattccatacgctttggtgcgtccactgctctggaagacgaaaaggacctcagcaaggtgcatttcagcaccgagctgttccgtgcctacacggaaggattcgtgggcgaactacgtggcagcatcaccgcgcgcgaggccgaactgctgccgttcagcggcaacctgctcaccatggaatgcggcatgcgctttctcgccgactacttggaaggcgatatctactttgccaccaagtaccccgagcacaatctggtgcgcacccgcacccagatcaaactcgtgcaggagatggagcagaaggccagtgaaacccacgccatcgtagccgacatcatggaggctgccaagtgagccgtcagtcgaaccatacccgaaccagcatgatgggggccgagcaatgagcgatcagctgaccgaggtatacgccagcatcgacgccctagtcgattacgccttggatcatctcgacctcgatccacgcaacgcagactggacccgcaaccaaatcttcgccctcttccacctggattcctaccccggacccaaaaccacaacgtcggcggcgtcagtgtcagacgcagtccaagacattgtcggcagccgaagccaggccccctctgacgaaaagacccccgaccccctactcgccgccttccgcgccgccgccacaaccgccggcctcttcgatccggaggaaggcccggcctacgccgacaccatcatgggcatcctctccgccaaccccgccgatctcgacgaccggttcctgctcatcgagcacagggacggcggcatggccgccatgcaatggttctacgactactgtgtggccaacaattatgtcaagcgtgcccagctcgaccggaacccgcgcttcgactcgcacgggctgacggtgaccatcaacctcgccaaacccgaattcaagaacatgaagaaggcggcggccggcaacgccgtgtccggcggctacccgaagtgcacgatctgccatgagaacgagggcttcgccggacgtgacaagcgcacgctgcgcaccctgccggtcacgctcggcggtgagtcatggttctggcagttctcgccctacggctacttcgaccagcacggcatctgcgtgaacaccgaccacacgccgatgcatgtggaccgcgacaccttcggccatctgctcgacttcgtggaccgcttccccggatacttcctcggatgcaacgccgcgctgcctcgcatcggcggctcggtgctcgcccacgaccactaccagggcggcggcgaactgctgccgatgcacaaggccgccacttgggccgccttcacgctcgccgactatccggacgccgtggtcgaaatcctcgactggcccggtaccgccgtacgtgtggtgtcgaaaaaccgccagagcatcatcgacgtatccgacatcatccgcgaggcatgggtcgcttatgacgacgcggcgaacggcatcgccagccatgacgcggacggcaaccgccaatccgccctctcgcccagcgcgatcatcaccgaacgcggctatgagatgagtctcatcttccgtaacaatgcgatcagcgacgagtacccggaaggtattttccatgcacaccccgaatactggccggtcaagcaggagccgattggactgatcgaagcccaaggcctgttcatcctgcccggacggctcgtcgaccagctcggc

SEQ ID NO: 2971 - DNA, 6244 bp, Unknown
  R19_24m  MAG No. k141_9151
aagccatcggcagcacctggtagttgccggaagacacggtgtcggagaacttggactcggccacgttcacgaccttgaccttgatgccggccttcttcatcatcgcctggtaggcgttggcgagggcctgctgggtggcgttgtcaccgaagaaagtgaaggagatctcaagggtcttgccgcccttggcgtagtagccgtccttgcccatcttgtagccgtcggcctcaagggttttcttggcgttgtccacgttgtacttggcctcggcgggcaggttgttctcgtagcccttctggaacggcagcagcagctcggagcccggctgctcggccttccagttcaggccctggaactgcacgttgttgtaggtgttcacgtcgaaggcctgagtgatggccttacgcacctgcaggtcgtcaagcggcttggacttgccgttgtactccagcacgcgggtcttggtgctgtagccgatgcgcagctgggcgtccttgacggaacggatggccttgatgtcgtccttggtggaggcctccacggcgtcgatctcgccgttctggaaggcgttgagggaggcggtggcggccatctgcttgtagacgatcttgtccagcttcggcttgttgccccaccacttctcattcggcacgaaggtgacctgggagtcggagaaggagtcgaccttgtacggaccggcggcccactcgttgtgcgggttcttcacccagccctgggtgaaggtcttcgcgtcggcggccttcgggttcaccagagcgccgaagacttcctgccacgggtagtacggggtcttgtaggtcaccttgacctgcttcgggctgtcgccctgctcaacgctagcgatacggtcgaagccgtcggtgctcggcgggttgtagtccgggttggagccgttgttggcttcccacgtggccttgaaggcggtccagtcgatgtcggagccgtcgttccacttggccttcgggttgatgtcgtactgcacgaccatcgggtccttgctcacgagcttcatgtcggtcaggaagtccgggttcaccttaatcggggagccattgacctggtcggtcatgagcaggctgggctggtaccagctccacagctcggacatgtagccggtgttgccgtcggaagacaggtagttccagttcgggccgatttcgacgatggacagggtcagcgtgccgccgtccttgacgttgtcacggctctggtggttgtcgtaacgctcggtgaccttcggcatgggcaggtcgccggtgtacgacgaatcgatgccggccggcggttcggtggcgctcgaggcattgctggaaccgttgccattgcccgcgccgcagccggcaagcagcatggcaagcgccgcagtggccgcggcgagcgcggtcagcttacgtgtcttgttcattgttatttcctcctctatatggttccgaccgtcatgcgaaatggcatgcaacctgatggccgctcggtcgggaagtgtcatacggccgcagcgccgggcgttcgccgcggcagcgggcctgttgttcggcgctcagcttgggcatgagcgggcagcggcccatgaacgggcagccttcgaacgtctcggtggggctgggcacctcgccctgcagcacgatgcgctggcgggtgcgttccgccttcgggtccggcaccggcacggcgctgatgagcgcctgggtgtacgggtgcaacgggtgctcgaacacgtcttcggtgtcgccggattccacgatgcggcccaggtacatcaccgccacgcggctggagatatggcgcaccaccgacaggttatgggccacgaacaggtaggccacgcccagcttgttctgcaggtcctcaagcaggttgatcacgccggcctggatggacacgtccagtgcggagaccggctcgtcgagcagcacgagcttcgggttgaccgacagcgcacgcgcgatggcgatgcgctggcgctgaccgccggagaactgcgtggggaagcggtccacctggtcggggttcagctccaccagacgcatgagttcaccgatgcgttcgcggatctgctctttggagtagtgctggaccttcatcggctcggccaggatgtcgtagatcggcaggcgcgggtcgagcgaactcatcgggtcctggaagacatactgcacggccgaacgcagctcgcggcgcttctcgcgcggaatcttgtgttcgagcttggtgccgaacatctcgatctcgccgtcctgcggctgcttgaactccatgatctccatgagcgtggtggacttgcccgagccggactcgcccacgagcgccacggtctcgccttcgcgcacgtccagcgtcacgtcgtccacggccttgacctcgccgatcttacggcgcaggaatccgccggcggtcagcgggaaggtcttgcgcatgtgcttgacgtcgagcaccatcttgcgttcgtcgcgcgggatgccggcgaacttcgacttggcggcctcggccaccgtgtacacgtcgtggaaggtcaggcccttgtccacgatctcctgggtgcggtggcaggccacgaactggcccgggcggcccggcaccggctccatgggcggctcggtggtgtggcatatgtcggtggccagcgggcagcgcggcgcgaacgggcagcccttgggcatgttgaccaggttcatcggggagccaggaatcggcaccaggcggctgttgcgttcgcggtcggaacgcggcacggcacccagcaggcccatggtgtacggcatggccgggtggtcgaagatggagtcgacgtccgccttctcgaccgggcggccggcgtacatgacgacgatgtcgtcggccacgccggcgatcacgcccagatcgtgggtgatgaagatgacggccgcgccggtttcacgctgggccttgcgcagcacttcgagcacctgggcctggatcgtcacgtccagtgcggtggtcggttcgtcggcgatgatcacgtccgggtcgttggcaatggccatggcgatcatcacgcgctggcgcatgccgccggagaactcgtgcgggaaggacttcaggcggtcctccgggtccgggatgccgaccaggttcatgagctcgatggagcggtcgtgaatctgctgttcggtcatcttcggattgtgggtgaccagcgcttccttgatctggtcgccgatggagaacaccggggtcagagcggagagcgggtcctggaagaccatggcgatgcccttgccacggatctcgctcatctcaagatcggacttgctgagcaattcctcgccgtggtaggtgatggagcccttgacgctggcgttcttgtccagcaggcccatgatggccatggaggtcacggacttgccggagccggactcgcccacgatgccgagggtcttgccggggtacaggtcgaagttcatgccgcgcaccgcgtgcacggtgccggcttcggaggcgaagctgacggtgaggtcgcgtactgaaatcaccggttcggatgccatgccttgcgctcctgtggtgttggggttggtgttggttgttacgttgcttgcgttgcgttcgtcgctcatgatgcccgtctcccctctcactcggccttgccgccggaacgggagtacgggtcgatggcgtcacgcagtccgtcgccgatcagctgcacggagaaggtcaggacgaccagcaccacggacgggaagatcagcacccatggcgaggtctgcaccacggactggccggcgttgagcagcgtaccgagcgaggtgtcgggcgccttgatgcccaggcccaggaagctcagcgaggtttcgctgttgaccgcaccgatcacgccgagcacggtgttgatgaccagcaccgaacccaagttcggcaccagatgacgcacgatgatggtgaaggacggcacacccatgaacttcgccgcgcggatgtattcgcgatcgcgcaggctcagggtcagcgtgcgcagcgtacgggcgtagccgatccaaccgaatgcggtcaggccgatggccagccacagccagtcgctgccgccggccgccatgccgacgatcagggcgatgagcaggaaggacggcacgacgagcagcatatccagcagccacatgcccacgcgctcgaaccagccttcgaagaacgccacggccgtgcccaccagggcggcgatgatcgtggtgccgaacgagctgaagataccgatggtcaacgaacggccgaggccgcggatgatcatcgcgtacatatccgagccaccgaccgtggtgcccagccagtgctgggcggacggcggcgaggcgagggcggcgaaatcgggctcatcgtagctccactgggagaatttcgagccgaaaatcgccaaaagaatcagcagaatcagcaccaccagacccaccacggccgaggggcggcgcatgaagcggcgcacgtacagctgcatgcggccggtgcggtggaagtcgtcggcgctggaagcctcctgggcgttcctggcgtcggcggactgcggttcgctgccctgcggatcggtgagttccatatcctgggcggcggcgtcggagaccatgttctcgttgtcgttcatcatgttagatcgtcctttgcgcggggctcagctcagtcggatacgcgggtcaagccaggcggagaagatatccgccagcagcgcgccggacagcgtgcacacgccaccgaacgcggccacggccacggcaccgttgatgtcgttgttggcgatggtctgggtgaagtacatgcccaggccgttgatggcgaacacgttttcggtgatcaccgcgccggtgaacacgccggcgatggagaaggccacatccacggcggtcggaatcagcgaggtgcgcagtgcgtggcgtcgaatggccgcgttgagcgtcaggcccttggcgcgggcggtgcgtacgtagtcggcgttcatggtgtcgagcaggtacgtacgctgggtgaggtggtagcccaccatgcccggaatcgtcatcacgatggtgggcaggatcaggtgctgcagatagtcaaacacccaaagcaccgggttggagccttggtaggagtgcaagccggtcacgtagaacgcgcggctgcccacgatgttgttgaagttgatggccagcagcaccaccatcaggcccatgacggcggccgggaccaccaggaagaacgttgcggtggtgttgagcacgcggtcctgccacttgtactggcggatggccgtgtacacgccgatgctcacgccgaagaggatggagagcacggtggcgagcgtcaccagctgcagcgaagcggagatacgggaggcgatggccggcgccaccggcgactggtccgggctcaggccccagttccactgggtgaggatgcccttgagccagcggaaatagcggatgacgaccggcgtctggtcgttgatgttggccagatcgagcgaccggttaatcgacgcaatcggcggatgcggattgcgcgacatgtagttcgaacgcggatccatgaatgcgctggccaggaaatacgtcatcgatactgccacgaacagcatgatcacgtagttcacaatgcgcttgatgatgtacttgaacacccaaccacctcccagataactgaagaagtgatacccccccccgctcaaaaccacaaattgagttcaatatatggaatatgggtattgacttttccgactttttcctgtacggaaaaccgcgaaaacacttactgtatattgggcaaacatccgtttgttaattttgtatttcctgagcctttgctggacatgccttatactttcgtgtcagcagtccgccggcccggatggtgacagtccccgccgccggcaacggattatccatcagcatcatcagcatcagacaggggcatcatgacgacagacgccagcgcacgggccatcaaacccgaacttctacgtacgtacaccgaggacttcaacaaggaccgcgccaacctgatcgcggcggacgcggcggtttcggccggcgtactcaaggcggccaccgactatcgcggcgtgcgtgcgctgccgcgcgacttctccatcgaactcaagcagggttcgatcaccaatcaggagcgttccggccgctgctggatgttcgcctccctgaacacgctgcgctacgagcttatgcatcgctggaaccttgaggacttcgagttctccgagacctacctcttcttctgggatgcgatg

SEQ ID NO: 2972 - DNA, 4994 bp, Unknown
  R19_24m  MAG No. k141_9208
atgtagtcgatgcagccgtcgggcagctcgttgatgagctgaacgaggctttcggtctcagccgacagacccacgatggcctcgtcgccgagcagggcgcgggcttctcgcggctccatgtcggtctggccgatatgcacaccgtccaccttgatgcccttgcggcgggcctgccacaccacgtcggcacggtcgtcgatcacaaaggccacggaatcggacttctcattgtcctcgatgatctgcgcgatgtcgcgggccatgtcggtcagctcagaggcatcggcctccttggcgcgcagttggatgaaggttgcgccgccgcgcagagcctgatccaccacgtcggtcagcggacggcctttgcagtcctccggccccaccacgaagtacgcggacaagtcgaagttgtctcgcatggaggcgtatgggtattcattactcattattattcctacctttgttgtttcttgtggaagtcttattgggaaaaactgttatgagctccctcatcagagggaactgaaactactgcaccaaaatctcggattccgccacctgttcggcggtaacattccacagcgcgtcaaggaacgcgacctggaacgagcccggcccgtgcgaagtcgtatcggctatctctgccgcgcggttgtacagcagagatgcggacagagcggcggtcaacggatcggaaaccgccagatatgtggcagccacgccgcccagcgagcagcctgcaccgatgatcttggtcatcatcgcgctgccgcccggcagtcggtacacggtttcgccgtcggtcaccagatcggcgatgccggacacagccactgcacagcgggtggaagcgtcatgggaggaatgcttggcgtgctgttcggtcagatactgtgccagcgccaccgccgcaccggttgcggactccacgtcgtcgacggattccactccggcggggcggtgctcggaagcgtcccccacggtttcggtattgagcccccacatgttcgccagcgcgattacctcggaggcgttcgcgcgaatcatggtcgggggagcggccttgaaggtctgaagaatggcggtgcgggtgtggccgatgccggcggccaccgggtcgagcacccacggcttgtccaagtagttgagtcgctgggcgatttcgggcagcgcatccttatagaacggcagcagcgtgcccacgttgatgtagttcgcgcccgcgattttcgcggtttcgatcacgtcgtccggcaggaaactcatggccgcagtgccgccggccgccagttgcgcgttggcgaccaaattgatggtcacaaaattggtgaatgactgggccaatggagtcgtctcgcgtacgcggcgaacggcatcggcgatattgtcgcggatgggtgaatcggctggaaccggagtcccggcggtacaaccgctggacacatcggcaaacgatgatgcactattgctcatttactgctccctacgatggtcttaaccaacaggttctaagggtcaggctcaggcctttctcaactcgcgaaccacatgcgagtccccctgcactacagtgccgacgctatgcgccaacatggacattatcgtgacggatttgttcgatacgtgtcgtcaggtctggcgcgtcccgtccattcgtgatatgtggacgcctccgccgagcaacatctcccggatttgtgacgctgacgcgatgtcagtggtacaaattcgggaagggtaaaacaacaggaacaatatggaggtgttgcgatataggaatcgctgcgaacggccgctcgtgagacgcggaacatataccggacaatgccgcctgacctgtcaccgtatacggctatcctgaagcggttgttattagaccccaaaccgttcaaaccagaaggtgcattgtggctcagtccaaactcgatgaagtcgtatcccttgcgaagcgtcgcggcttcgtgttccccgccggcgaaatttacggcggcacccgttccgcttgggattacggccccctcggcgtcgctctcaaggacaatatcaagcgtgaatggtggcgctccatggtcgtcacccgtcctgatgtcgtcggtgtcgacacctccatcattctgccgcccgaagtgtgggtggcgtccggccacgtgagcgtgttcaacgatccgctcgtcgagtgcctcaactgccacaagcgcaaccgcgccgacaagctcgaggaatcctacgccgagaagcacggcgacaagatgccggaaaacggcatgaaggacatcgtctgcccgaactgcggcacccgtggacagtggaccgaaccgcgcgacttcaacatgatgctgcgcacccacctcggcccggtcgaggacgagaacagcctgcactacctgcgtccggagactgcacagggcatcttcgtcgacttcaagaacgtgatgacctcctcccgttccaagccgccgttcggcatcgccaacatgggtaagtccttccgtaacgagatcaccccgggcaacttcatcttccgcacccgtgagttcgagcagatggagatggagttcttcgtcaagcccggcaccgatgaggaatggcaccagtactggatcgacgcccgcacccgctggtacatcgacctcggcgtcaagccagagaacctgcgccactacgagcacccgaaggagaagctctcccactactccaagcgcaccgtggacatcgaatacaagttcggcttccaaggttccgactggggcgagctcgaaggcatcgccaaccgtaccgattacgatttgagcgcgcactccaagcactccggcgaagacctgagctacttcaaccaggccaccggcgagaagtacgtgccgtacgtcatcgaaccggccgccggtctgacccgttccctgatgtgcttcctcgtggacgcctacgatgtggacgaggccccgaacaccaagggcggcgtcgacaagcgcaccgtgctgcgtctcgacccgcgtctggccccggtcaaggccgccgtgctgccgctgagcaagaagcctgaactgcagaccgtggcccagaacctggccgacgacctgcgcttcaacgaatggatgatcgactacgacgagtccggtgccatcggtcgtcgttaccgtcgtcaggacgagatcggcaccccgctgtgcatcaccgtggacttcgacaccctcgaggaccacgccgtgaccatccgtgagcgtgacaccatggcccaggagcgcgtcgctcttgacaaggtggccgattacgtggccgcccgcatcggcgagaagcgcacccgcgtgcccctgaagcccgtggaaatgggcggcgaggcttggcctgagtccggcgttcaggaagccggcggtctgtactaaagacgggtctgtatagaggctcccctctatgaggggagctgtctacgaagtggactgagggggggctcttgctgaggcgactcccctcagtcgcctacggcggcagctccccctcaaagaggggagccaaaactatttcagaacaggaaccacatggcagaatctgaaaccgaaaccaccatcaccgctactcacgagaccaacaatctcgacccgcgtacggacgcgccggcacggcccgagactccggtatacatcgcccccgtgcagctcggcaacattaccgtgccgaccccggtggtgctttcgccgatggcgggcgtgaccaactggccgttccgcgtgatctgcgaggaatacggtcccgatggtctttacgtggccgagatgatcaccgcgcgggccctcgtggcgcgcaacccgaaagccctgcgtctctgccatttcgccaaaagcgaaaaaattcgttcgctgcagttgtatggcgtgaatccgtccatcaccgaacaggcggcgaaaatcgtggtcgacggcaacatgaccgaccatgtggacctgaacttcggttgcccggtacccaaggtcacccgtcgcgggggaggctcggccctgccatggaaaaccgacatcttcaccgagctcatccagcgcgtggtcgccgtatgcgagccggcgggcatccccgtcacctcgaagatccgcgttggcatcgaccataaccatgagaccttcctcgaagccggacacatcgcgcaggaggagggctgcaaggccgtaaccctgcatgcccgcaccaccgccgaatactatggcggtcattccgactggtcccgcatcggcgagctcaaggaacacctcaacattccggtattcggcaatggcgatatctggggcgccgaggacgcgctcgaaatggtgcgcgagaccggctgcgacggcgtggccatcggccgcggatgtcagggccggccgtggctgttcgccaacatcaaaaacgccttcgagggcaatcccgaacggctcaacccgaatctgggcgaggtctgccgggtgattcaccgtcatgccgagctgcttaccgagttctatgagggcgatgagatgatggccgtccacgatctgcgcaagcacatcgcctggtatctgaaagggttcccggtgggtgggtccacccgcaaggcctttatggaatgcgagagcctggccgatgtggaccgcgagatcggcaagctcgacccgaccatcgaatacccgccacgcgtggtcgacaaaccgcgcggccgcgtgcgtttcgccaagaaggtgcacttgccgtatggctggttggaatcgcgtaccaccacccacgaagagcgtgaggcgctcttcggtgacgacccaatggacgccagttactgagaaaatactgaaaatacacgcaacacgcgccattctgcgcgtgaatttccctccaagagtagcctgtttgcgctactcttgggtgtaaccgtgaagtgacaggagccaaacgtgagcgagatcgcgcagaatgagttcaacgacaagaccaacatcaaggttgttggcgtcggcggtgccggcggtaatgccgtcaatcgcatgattgccgaggga

SEQ ID NO: 2973 - DNA, 2610 bp, Unknown
  R19_24m  MAG No. k141_9355
aacaccaccgccagaaccaccgaggtcaacggcttgaccgccacgtcatgcacgttcacggccaactggtaaagcgccggattccacgtctccggcccctgcgacagcatgccagtggctatcgaaccggcgccaccgcccccgatcatgttgagcatcgcaacgatgaaatcctccatgccgggatccccgatgcctcaaaccggctcagcccaacgccacggcgctgaagatctgcgccgccgcgataatcatgccgccgcccacgatctgccacaggcccgactgcgtctgcggcccgttatgatccttcaaaccaccaccgaatgtcaccgcgccccacaccagccacaagccaccgccaatcgtcgcgaacttcacgaacaactccagcacctggttcatcaaatccacagccgcactcctccgcacaggaacggcacggcccaccgccatgcctacgcatacggccatcctcgtgcagtcccgtggaatcagcggcggacaaattcacacagcattcgttcagcatacttacagaaataggtaaatcaagacgctatagtattcgccaaaagatgcccggaaaagggaaaagaatgcaaaataacgaccagcagcagaatgatctttggattaagcaatctctcagcgccgcttcaaactgggaagaactagacgaagccgatcgagtctcccttcggaaagcagcagcatggtacgcaatcatcgccatcggattagctattggtgtggggattctctcattcaccattctgcaagacggcgcaaaggctacactcgtgacttcgtcgctcgccatcattggcgcggtctttcctgcgatagaaaaagtcgtgtcgggatcgatggaatactttgaatcaacaaacgagaaacttcatgttgcaaaacttaaattgatgcgcagttatttcaacctatatgcattgattctggtcggtgctgcgcttctcgatttcattgccgcagcattcctcggcctgtggcaataacgtttggagatgacgtgaaatggcagatgacatttgccgaatctgcggtaaagaagggccgctgagctttgaacacatccctcctcaatctgtgggtaatgatcacacggtgaagctctattcaggcgttgacgccgtgaagagcagcttgaccgggcaggatgacatggaaggcctgaagtatcggcaattgcaaagaggtcaaggattcaagacgatttgcagctcatgcaatagttatcttggtcaaaactacgtcaagccattcagtgagttctatcgtgcaactggacagcaaatccttgtctctgactttcaggaaggggataaatccattcatttcaagacagataggctcatgcctcttgcatttgtgaagcaggtgatgtcgaacttctgtgtatcagctggtgatatgcatgactgtaaggactatctcttggatagggagagcactgttttcccccagcgatacagactccatatgtttatagtcgataacctgcgtgaacaaaagctgttcaccggatggatggttcccatatttgcggattacacgtgctgcaaaatggcatgtatcaggataccgccattcgctttcactttgtttgatctcagttctagtaataaggtgcctgaatggccaggcaacataaccgatttagctagagtgccgtggggagagaaacctggcatcgagtttcacttgtcagtgcttaaagcagcgaatcatagtccgctgtcatgggggaacgttggctaaagccgatggggaacagacgaaataggcccgcaggactacgcctgcgggcctagtatgcactgccccgttttgccgggacagttgcatggtatcaccgtctaactgccaactggaatacgaaagttggctctaagcagcagatgggtggttgttattagttcatgggcggctccttgggattgatagtggtgacgagttgggcgaagtccggctcggggccatctccattgggactgccatcacggccagcgccatcatcattcgcgtcgttctcgtgcccggtgtggcggccgttggcgcgggtgaggcggatcgcggcggttgcaccggtgccgaggagcgcgaggacgaggatgacggcgatgaggccggcgatgttggtgccggtggtcgcccttgatggtctctcccgtcgccggaacctcggtgtcaacggttttggcgaacacgtatgcctcgccgtcgatggcctggatgttgaaccggtcggtcacatccctgccgttggccttgtcggtcacggtgatgtggctctcgtcgagttcgaggtattcgtcgtcccagtcatcgaccatgcccagccgccacaccttgtaggcatggttcgtctgcttggcatcgaggtcgatccgatagtagatgcggtctccaagcaacgcggtcttgccgtcgatcgaaatggacgggtcggcctgggtgtcctccttgcccggctggaagtcgggcgtatcgttccacaccttgttgcttggtgtgaccgagttgttcaaggtcaacgcccactggttgtcaaccacggtgtcggccggagcgtcctcggccacgacgccc

SEQ ID NO: 2974 - DNA, 12769 bp, Unknown
  R19_24m  MAG No. k141_9552
ccatgtgttgcgtttgattccgcggctgaccgtggaggcgtgtctgccgatcaggccggcgatccgccgtatgctcgtcccgttgccgatctctatccggatgatccgccgttcctcttccgacaggtgcgaatacacttgccccaaggcgcgacaccccttcactggttatctggacaatctccaatctaaagggtgttgcactttcatctagacaacgggtgccaattttcattggcatccatatgatacgattaacttatcagatgtctgatgtctcgatatcgagacgtacgacaacccatcacaagaccgaggcgacgagcatggcaccatggcagacaacggatttcccacacggcgcgggcaccgtcatcgccgaattctccgtacgtgcggacgggccgatctggcgggcgcaggtccccgccaccgccgacggaattcccactgccgccccatacctttgcctggccgtgcgtgacgggcacctcacgctgacggcgcggtccctgtccccggacccggccgacccaaatgcgcagtcccacgtcagcctcgacatcgaagacgccttcggcctcgatcctggaacgatacacgaggccgcattgaccttcggcgcgttcggcacgcgcatctacctggacggataccaatgctttgcctgcgccggcaatctcaatccctcacgggtccacccatcgggcgcattcgacctcggctcacccaatgccattgcttgcaatgcgttcctcgtcgaccccgtggattgggacgccgtccgcatcgccgagcatgccgcggcggccaagccggatatcgtcttcgcctcggaccggctctcccccagggataccgatcgcatcgccctggcggatgcgggcagcgtccatgcgagattccgcctgcgcggccgcggacagcatggcacgatcctcgcggccggcgtcgatggaagcgagcgcatgaccgtcgccatcggcgccggaggactgacgctggccatgcgggacgaatccggagcgggcatcgcatgccacgcgccgggccattgggatgacggaggctggcacgatctggccgtccgctcctcgcgcggcgccgttgacctctttatggacggcgtcagcgtgctgcaccagccgggccagatgtggttcgcggatctggccggtccacgccacggccgaaaaggcatcgacgctttcaccgtggggcgcaatatcgccggggtgcggctcatgggcgaggtcagccgtggaggcctgtacgtccacgcgcttaccgacgggcagatcgcacggctcgctcacactcccccgatggtcaccacggcgctgttcgacgcgggatacgccgggtcggccagctatcgcataccctcgctgatccgcaccgtccgcggcacgctgatcgccggggccgaccagcgaacggcgatcagcaacgacgcccccaaccacatcaacttcgtcatccgcaggtcaaccgacggcgggcgcaactggatgccgatgcagacggtcatcgacatgcccggacgcgaggacgggctggacggggccagcgcgctcgactcctgctccgtagtggaccggagcatcggacgcatcacggtattgatcgatctcaatcccggaggcatcggcctgaccaactgcgagcgcggcatcggcgtgaaccgcgacggcgttctgcgtctgcgggacgctcagggcaatgagaccacgctggacgccgtggccgacgccggcgacgtgtggcgaagtcccatgcatgccgacccgtcgcaacgctggcatgcggttcccacctgctacatcgcgcagatccattccgacgacgacggcgagacctggtcaccgccattcctcattgacgcaatggtcaaagaggaatggatgcatttcatgggcgtatgcccgggaaccggcatccagctggacaaggggccatatgccggtcgtctgctcatgccgttctattgcagcgggcagagccgcgcccactattccggcggagcactgatcagcgacgacggaggcgaaacctggcgacgcggacgcatgatcaacgaggggcgcgagatcaacgggaccgtcgtcgatccagccaccatgcgcgacgacgacgcaacgaccagcgaaacgacgttcgtacagcgcgcggacggcgacgtagtggcgtttttccgcaaccagcacgccagcggacgcgtgggcaaggcggtcagccacgatggcggcgatacctgggacgagcttgagttcgatcccgccttgccggagatcttcagccagccgaacgcccttgcggtgccgcagcttggcactgacgcggtgctgttcgccaacgccagccagatgatgccataccggggacggggcatggtgcgactgagcgaggacggcggacggacctggacgggcagcctgtgcgtgcacccccatcatcatgtctatcaatgcatggcaatatgtgaaacgacgcacgacgtagaatgtgaaggttcacaattgggactattgtgggaaatagagacgacgggggtttacattacgcatatcccccttgcatggttttcacatggccacgataagggcgtcgcggccaaccatacggacgacaaggagtcatcatgaacggcacagcagaccgagccacggcgggctcacgcgcaacggatacggaacccgacgcgccgcaaggccaatacagtacgcaggagctggccgcgctggcgcgcctgtccctgggcaactggtcgaccacgcaggtctcttcccgcagccgatgcgacgagacgatggacgcgatcaagtcgtacatactgcgcgaacgtctgcaaccgggcgacgtgctgcccaccgaaacgcagctgtgcgacaccatcggggcgtcccggtcgtcggtgcgcgaggccgtgcgcaagctcgaggcgctgaacatcgtcaaggtggagcacggcaagggcaccttcgtcggttccctgtcgctggaccctatggtggaaacgctcgccttccggtcgatggcgtcggtcggcaagaatttcaccgatctgcaggacgtggtcgaactgcggcgcttcctcgacctgggatgcgccgaggaggtctgcgcgtccctggcgggaaccgagcagccgcgcctgacggaacttgccgagcgcatgagcgccgaagccaaggaaggcaagacgttcaccgggctcgacatcgaatttcacaggggaattctcgattcgctcaacaacaccgtggccaagcagatggtccgctccctgtggctcgtgcacatggccgtgctcccccagctcggactggcggtttccagcgaacttgaccgtaccgccgacgcccatcaccgcatgctcaacgcggcgctggccggcaatgtggacgactaccgcgaggccgtgttcgaccattacgagccgatcgaatcgattctcaagcgtcgcatcgtccaggagcagtaaacccgaaaccgcgggccgattggcgcgggcaatccagtcggcccgaccgacatgcgacacgccccttcaaaaagtaacccgttacacgatccgacggcccgcgcaccacaccgcggtcacggtgagcgtgccgggattggtgagcagcaggtcggcggcgtagccgggggccaccaggcccagcggcgcgccggttacggggttcggccgatcaaggccgagcgcatgcgccggggtgagcgtggcggcttcgagcgcgtcggtcaggcccatgccgagctcgcgcacggcgcgctgcaccgccacttcgaggatcagcgtcgagccggcgatcgcgccgttcgacaccagccgggcgtggccgcccaccacgttgacgtccagcgcgcccagtttgtaggcgccgtccgcacaaccggtggcggccatcgcgtcggtgacgaacgcaatgcgatgcggcgcgaaacccagtgccaggcgaagcgcgggattggccacgtggaagccgtcgttgatcagctcgatcgtgacgcgcggatcctcgaccgcggccggaatcgggccgggctcgcggtggtggatgccgttcatcgcgttgaacatgtgcgtcatgatgcccgcgccggcgtcgatcgcccggcgtgcgacgtcatagtcggcgtcacagtgtcccacggcggggaccacgccggccgcggcgaagcgccggatcgcgtccatgccgcattcgcgctcgggggcgatggtgatctgccttagcgtgccgtcggcggcctcaagcagacgctccacgcgctccggggtcggatcgcacaggcagttcgggtcatgcgcccccttgcgggccaacgccaggaacggcccctccagatgcgagccgagcacgtcgggccgcgttgccatcacggacctgacgcattcgaggttccgcgccatcacatccagcggattggtgatcagtgagagcacctggcgggtggtgccgtgcagcatgtggtacgcgcgcgccacggcgatgccctcggcaccgtcgtcgaacgaacgctcccaggcgccatgcgcatggatgtccacgtagccgggcgtcacgagcatgccgccggcatcgacctcggcgacctggtccccgccgctgagatgggcgatgcgggtttcaaggtcagcgtcgctcgtgcccacggcgtcgattacgccgtccgtcacgctcacccatgcgttgagctgcacgccacgcgcatcggccttgactgcattgcgaatgacgaaggttcccgccctggcggcgagcgcatccgcgaccatcgtcgcctgatagcgtttttgcatctgcgtttcctcagatcttctgccaggcgggcttgtgctcgtaggaataccggtagtagtccttgccgcgcagtttcgaggcggccgcctcgtccacgatgatcgtagcgtgcgggtgcagctgcagggcggatgccgggcagtacgagctcacgccgccctccacggtctccgcgaccgcctcggccttgcccgcgccgaacgcgagcagcacgaggtggcgggccttcatgatcgtgccgatgccctgcgtgatgcagtgcgtgggcacctggttgatgtcgttgtcgaagaagcgcgcgttgtcgatgcgggtccgctcggtcagcgtcttgacgcgagtgcccgaggcaagcgacgatccgggctcgttgaagcccacgtgcccgtcggtaccgatgcccagaatctgtacgtcgatgccgcccgcggcctcgatcgccgcgtcatatgccgcaccggcgccggcgaccttgtcgccgtcctccagcgcggtgccgttcagcgcgtcgcccggcacgtgcaccttggccgggtccagtcccagcggctcgaccaccgtgcggtggatggtcgcatggtacgactcggggtgcgtcagcggcaggccaatgtactcgtcgagcgcgaaaccgcgcaccctggatacgtcgattccctcgtccctgacgattgtcgcgagcgcccggtacgccgccagcgggctcgagcccgtggccagtcccagcaccgcgtccggcttggccttgatcagatcggccacgcaacggccatacagttcgccggcctcctgctcggatttgacgatgatcacttcagccatggcaattcctttcgtatgagcctattggcgttgcgccgcacgaacgccgccacgcgcttgcatgcgggcgggcattcgcgcaacgcatatggttgtgcggcaatcaggcctcagtggaggcggaaacctcttcgggggtgcgttccagcttcatgccgcactcctcgagcacggtggcgatgcgtttcacattctcgcccttgagcggcagcaccggatcaggcatctggttggtgtcgaacacgcccagcagcgccattgcggtcttgaaggcgcccactccggatccgaagcccgccacgccctgcggcacggtgacgatgcgcatcagcgcggccagccagtcctgctccttcctgaccgtggtccagtcgccggcttcggcggccttccacatgcgtacgtagccggtggcctccacgttggccaggcccggcacggagccgtcggcgccggccatgtaggcaccgtcgaccacaacctcctggcccgtcagcagcgtgagcggatggccggccttggcgttgtcgtccacgaggaagcggaaggccacgtcgtcgttcgaggagtccttgacgcctgcgagcacgccgtccctgcccagcttgaccagcaggtcgcccggcagcttggtatgcacgcacaccgggatgtcgtaggcgaacagcggcaggtccggcacggcggcgtgaatcaggcggaagtggcgctccacctcggccatgccgcccagggcatagaacgggcacgtggccacgatggcggacgcgccgagctccttggcctccttcgcatgctcgatcacgcggttggtttcggtgtcgatgcagccgacgaacaccggcacgcggccgtccacgacctgaatcacggtctggatgatctcgcggcgacgcgcatcggtgctgaacgccacctcgccggacgagccgagcgtgaacaggccgtcgacgccggcgtcgatcatgcggttgatcgagcgggcgaagctggccttgtccacttcgccggaagcggtgagcggggtgacgacggggggaatgaccccgcggaattgggttgccatgatgatgtgtcccttctttgaggattgtctttgaggattaaaaatggactgctgaaattattcggcgttggaatcgggcgaacgcgatttcaacgcgaggaaggcctcacgcgcattcggccgcggtgggatgcagcagcgagggcgccgcgtccatgaggatcctggtgtacccgtcctgcgggttgcgcatcacgtccatcgtcttgccgcgttccacgacggtgccgtggttcatgaccatcacctcgtcggagatgtagcggacggtttggatgtcgtggctgatgaacaccatcgacaggccgagcgtcctcttgaggtccgagagcaggttgaggatctgtgcgcgcaccgagacgtccagcgcggaggtgggctcgtcggcgatgatcgcgtccggcttgagcgacagggcgcgggcgatggcgacacgctggcgctgcccgccggacagctgcccgggcagggcgcccagcaccgaggtgggcaggccgaccatgcggatcagctcgtgggcgcgcctgtcgcgctcctccttggaaccgagcttgtggaccaccagcgggtcgagcagctggtcgatgacgctcatgcgggcgttcagcgcagtcgccgggtcctggaagaccacggagaccacgcggccgatgtccatgcgctccttggcggtgcggtgggtgacgtcctggcccttgaacagcaccttgccgctggtggcctgctgcaggccgcacatcacgttggccgtggtggacttgccgcagccggactcgccgacgatgccgatggtctggccgggcatgagcttcaggttcaccttgttgaccgcggtgatcctgttcttgtggaacagccccgatccggcgcgggtggtgaacaccacctcgacgtccctgagctcgatgatcggaacgttgggatccttcctgggggtttcggcggcgtggctcatcgggcacctccttcctgggtggaaactgtcgccgcggcgggcgtgacgtcggcatcggccggcagggcggcgtaatagtgatgcgtgccgggcacccgttcgaagatcgggcgcgtgttgaggccaacgtccgggtggctggagcggggagcgaagcgatcgcccttggggaagtcggccggggacggcacggttccgggcacctggtgcaggcgcttggcccctgcctcgatcgaggtgaccgagccgagcaggccgcgggtgtactcgtggcggggatcggtgaggatctccttggtgaagccctgctcgaccacctggccggcgtacatcacggtgatggaatgcgccaccttggccacgagggcgagatcgtgcgagacgaagatcatcgcgaagccgagcttttcgcgcagttcgttgagcaggtcgatgacctgcttctgcaccgtgacgtcgagcgcggtggtcggttcgtcggcgatgatgagcttggggtcgcgggtcagggccatggcgatgagcacgcgctggcgctggccaccggagagctcgtgcgggtaggattccagcgtgcgcttgggatcgaggcccacgagctcgagcagttcctcggcggagcgggtgccgccgcgggaggtgagctgcttcatctgcgccttgatgagcatggacgggttgagcgaggagagggcgtcctggtagaccatggcgatctcgtggccgcgcagggcgttgtgttccttaggactcatgccgacgaggttcttgccgtcgaacaggatctcgccgctgatctcggccttcgggtccagcaggcccatgatggccagcgaggtgatggacttgccgcagccggactcgcccacgaggcccatggtctcgccgggacgcacagagaagctcacgtggtccaccacgttcacgtcgccgtggcgcgggaacttgatgcacaaatccttgacctcgatgaccggggcggccgtgctcgtcggctcgaaccggtcggtgcgcttaagttcggcctccttgagtgcggcgagggaatcggccagggattcggcctgctccctgtaggcagcgactgggtcggtcaggaggcgatcctccctgcgctcggcctcggcgtcggcggcggacttggtcaccggggccgtcggggcggccaccatggcgtcggtgatgccctcggacaggatgttgaggcacagcacggtgatcatgatcgccagacccgggaacatggcctgccaccagtagccgaagatcacgccggccttggcggaggacaggatgttgccccaggtcggggtgggctcgggaatgcccgcgttgatgaaggacagcgacgcctcgaacacgatcgcgtcggcgacggacagggtggtgaacaccatgaccggggcggcgatgttgcgggtgacgtgcttgaagaggatccacggggcgcgggcgccggagacgatgaccgcgcgcacgtagtccttgccgtactcgctgatgatgttcgccctgacgatgcgggcgatctgcggcacgtagagcacgccgatcgagatgatgatgccgatcatcgactggccgaggatcgagacgaacacggcggcgagcgcgatgccgggcacggacatgaacacgtcgatgacgcgcatgatgagctcggagatccacgtgcgggtcacggcggcaagcgcgccgatcagcgagccgacgatgagcgcgaagacgatcgagctcaggccgatgaccagcgagtagcgggcaccgtagagcacgcgggagagcacgtcgcgaccgagattgtcggtgccgaaccagtgttcgccggtgggcgcctggtagctcatcgtgatctcgagcggatcgtgcggggaaaggacgggtgcgaagacggcgcagacgatgagcagcgcgatcaccacgaaggagatcttgcttcccacggtcatcttgctgaagcgattgaatttgacgccgggcctgcttgcggcctcggccgccttgttcttgccgaatagcatcgtcacaccgtcctgattcgcgggttgatcagcacatagagcagatcaacgatgatgttgatgatgatgaacgcgagggccacgacgagcaccacgccctggacgagcatcggctggttgccgttgatgccgtcgaacatcgcggtgcccatgccgggcagggcgaagatgacctcgatgacgatcgcgccgcccatcaggtagccgatcttcatgccgagggtggtgactggggtgatcagcgcgttgcggaacacgttgcgcgagacgaccacgctcttgggcacgcccgcgccgatggcggtgcgcacgtagtccttgtcgagctcctcgaccatcgaggtgcggatgatgcgggtcagctggccggccacgggcaggccgagggcgaaggacggcatggccatgcgggccaggtacgcgccggggtcctgcgtgaacgggacgaggtcgccggagccggggagccacgccatcttgatctgcagcacgtagatcagcagcacaccgagccagaaggacggggtggcgatggcgatgatcgaaaccacgcggatgatctggtcgacccaggtgtcgcggtacagggcggcgagcacgccgaacacgatggcgaacacgatggcgatgatcaggccgatgaaggtcagctgcagcgtgacggggaacgcctgggccacgcgggccgcgacggaatccttgttgacgccgtacacgcccatgtcgccgtggaacaggccgacgatgtagttgaagaactgctgccaccacggcaggtcataccccatctcgtggcggaaggcggccagcgcctcgggggtggagttctcgccaagcgccgcgacggcgggatcgtactgggagaaggacatcaggaagaacaccaaaaaggtgaccccgagtgccatgaacggcaaggcgatcagacgcctgcccaacagtcgtaacagattgctcactgtaaaagctcctatgcgtgcgccatcggcggttcagatgcgccgcgggcggggccggggcatccgcacgttcgcaggacgccccggttgccttgccgtccgttcggttcagccggtgatggcatatgtggattgcgtcagttcagcttggccttgaccaggttgatgccggtggagccaatggcctcccaagaggagaacgcgcccttcctgacggccgtggttgtcttgcgatggaacagcgggtagagcggcagctcttcggagagcaggtcgaagcactggttccagtactcctgtcgttcggaatcggaagaagcggcagtggccttgtccatcagctcatgtagctggttgtagccgtcagagcccttccagaaggagcgctgcttggtccaggcgttgtcgccgtaccaccagttcatcagcaggtcggggtcgttgccgaacacagagggatcgccgggggcgaggaccatcgagtagtcagcgtcgtccttgtccgtgatggacgggtacagcgcggaggacttcatcgactggatgtcgacgttcatgccgatctcggccaaatcgttcttgatctgcggtgcgagctgggtgatccaggaatggtcggtggtgtacagcgtgaagctgatcggcgtggtgaccccggcttcggcgagcagttccttggccttggccgtgtccttggtgtagacgttcttcgcctggtggtagtactgcgaatccttgggcaggaagctcgtggccgcttcggcctggccgctcatctggttggagatcagcttgtccacgtcgatcgcgtagaacacggcctggcgcacgcgcttgtcgtcgaacggcttcttcttggtgttgaacatcaggaacggcaggttgaagccctgcgcggtcttcagctcggagccggacgactggagggtctggagcgcctgggccgggaccatttccatgatgtcggtcttgccgccctgcatggcggtgacgcgggcggtgtcgtccacggtcacgttccacaccatgttcttggcctgggccgggtaggagccgttgtacaggtcgttcctctcgaatttgacctgctggtcggtgatctcggcgtacttccacgggccggagccgatgggcttgttcttcaggtcggcatcgctcatggacgacgggactatctggatcaacgccagtcgctgcttgaagagcgggaacgccttcttgagcttgaacgtcacttgggtgtcggacttcgcctcgacggaatcgatgaagtcaagcatcgaaatgtacagcgagccggtggcggtggtgcgctggtaggagctgaccacgtcattggcggtgacggcggtaccgtcggagaacttggcgccgtcgcgcagggtgaccacgtactcggtgtcggagaccttctccggatcgcccttggcaagagcggcatagggcttgtaggtgctgtagtccagcgcgtacagcggttcggtgacgtgccagttcgcggccatcggcagggcgccggaggtggtggacgggctgaagtcgcggctcgcataggcaacctgggcggtaatggtgtccgccacggcagttccggtcttcgcggcggtctgggtgccgccaccgcatccggacagcagcatcaggctggcgacggccgcggccacggcggccttgaactttccgtttctcttgatcatgcgatctcctcatcattgagtgaatttcgaatcaccgtccgacagacgacgcgatcctttcctaattgcttcattgaccgttccccggcctgcgtccgcttcggcctttccgcgttacggcggaccattgcggtttgtgcgggactcctgcggggaaccaccaacatcgttgtcgaacctccttaatggtaagacgtctgatgtctgatttcaaatcggcgtgttgaggaattcactcgtcaaggcccctccgcgctgatctgcctatacttcaccagccttgaatatcggcaatatttcgggcttcgccgaccgttatcgttccgaaaatgtttgtttaccattctgcaataagacatctgacgtctgttaacataacggcaactttcgccgccgacgaacgcggcaaacacgggatatggcgccaaacgacaagac

SEQ ID NO: 2975 - DNA, 15753 bp, Unknown
  R19_24m  MAG No. k141_9711
cgctgaaggggttcggttcaccagattgttggccacgcaccactcccctacgatcaccggcgtatagcgcgcggcccggcggatgcggcgttcgttccagcgcacgaacaagcgataccagcccatcagccaccgatccgggatcagacggaacagcgggaattgctcggccataaccagatagacatgcgtatcgagcatgacgccccgcatgccctcgcgcacgaaccagtcccgccaacggcccagtcggaagccgtcatggaacacgatgacttgattccctgccagaatcgggcgcaaccggtggtatgtctcgcggtagaaacgcttgaggaacgccatcggaataggcccgcttccccgcgcttcggaccggtctttcgcctgcctgctcgatggtgacatggcatacgtcagccagtcaatcggctcattcagcacttcgataccgaacagcgccgcgtggtcgcgataccggcgagccagacggaccagcacatccagcgcatagacgaccgctcgcgggctacgatgccagcgcaccacgccggtgaggccgccgttatcgaatccgttctgcgagccgggcaccgtgtgcaggtcgataagaatcttgagcccggcccgctcggcccagtcgaacgctctgtccagatactcggtacagcccgggtgaccgggcacatccccgaacacgaaatagggcactggaatacgcaccagattgcagccatgtgcggcaatgttccggaaatcggcctcggtaatatacgtgtcgcgatgccgcgtcagcaaagcctccagctcagccgacttcgtagcccgatgcagccagatctcgtccgcctcgccgctggcggcaaaaatccccggcttcatccaccgctccagcaccagccaattgccgaggttcaccccattaattcgttcgccaacacccagcgcgcccgatgccatacctgtcacgctaatcgttcaatgcttcaccgtagcgagcgaccaacccctgatttgcacgctcaaactcggggatgtaatcagcgatgatggcgtccacaagacgccgagctcgttcttcatcatagatatgagcagaatcattgcgatcgcgcagcatgcgcagccacaacgattcgtccatgaaatcatagtattgaaaagcggttttgagcacatctcgcggagagccggaagcggaaacagggtctccctcataagccagcagcgccttgaacagtttccaaccaagctcgaactgcaacccgaacttgtcaataatgccgctctggatgaaatcattgccgagatcctgttcgggagccttgcgcagcgaattcaatgcggaaacgtaattctcatactttttcatacagcacctttccgctacgctcaatctccgccctcagcgatgaagaaatcggctcatccagattgatgacatcaactttaagcagtgaccacagattgtcctgaaggttctgctccaagcgattgaaatcgggacaaccggccacggcaagatcgatatcgcttttaggccggttcacgccctttgcgcgagaaccgaacagcacgaccttgcgagcgccggcatcagcggcaaacgcgcgaatctggtcgtacacgtgctcgataggaaccatgacacctcccgccgcatccaacagtcccggaccaatcccggaccacccgcgcttccatcatacggccgcgtcccactcaccgcacggagcccgaaccacccgaacgcggcgacgtagttgcgggaggcgggctggcgctgtagggcgtgcgggaagttcctgacgtctacttttcaggaggtgaatcctcatgttcaccacgctttctctggccatcattctcgactgcaccgtacgcattgtgctcggcacggcattgggcgcgctgatagggctcgaacgccagttgcgcgcccgaagtgctcggcgtgcgctgggatgtggagcacatcaccacgtccgactgaaacgtccgactgacgctgaccagcaacatcgcaacagtacaacaagccaacaagtgggatggggcatcgagcctcatcccactttgtcattacccggcgattgtcagactcactcacgccacggtgaacgtggtgcgcttcaggtcctcacggcgcgaggaggggccgatgagcagttcaaattcgccgggctcgacgatgcggttggcgtccgggtccacgatcgtgcagttcgccaccgggatctcgaaggtgacggtcttggtctcgccgggttccagtgcgacgcgctggaacgccttcaattcgcggtcggtccagctgtaggaggtcacgatgtcgccgatgtaggcctgcacgatctccacgccggcgcgctcgccggtgttggtgagggtgatttcggcacgtacggtgtcggtttcggcgaatgtgccgtcggcgttgcttgcgccgcccgtaatggtcggttcgccgtatgcgaacgtcgtgtagctcaggccttcgccgaacgcgaacgccggatcctgggtgaggtcggcgtaccggtcgccgtgctggccgcgaatctggttgtagtagactggcagctggcccgcgtggcgcgggaaggtgatcggcagtcggcccgacgggctggtcaggcccaggattatttcggcgatggcctgaccgccgcgcatgcccgggttcggcgcccacaggatggagccggtgccggtttcagggtcgctgacgcgcttggcgaacacgccgtactcccccacgatggaggcgggcaacacctgcggcttggagctgatgagcacggtgaccatcggcttgccggtttcgcgcgagacggcggcgagcgcgtcgagcagggcgttctggccaccgagcagttcgagcgtggcggtggagcaggtttcgccgaccagctggaccacgtcgccgaccacggccacgatcagatcggactggcgggcgttggccacggcttcgtcgatcattgctcgatcgacggcggcggaaacgccgattttcgggcgaggctggccgtccgggtagaactcgccggcagggtcaggcacgaggtcgatgacgttcgcgccgcgcgagtagaccacttcgcaatcgtcggaggtgagctgggtcaggccgtcgagcacggtggtaatcatgcctcgaggctggccatccggcatccaagagacctgaccggagttgccggtccagtcgccgagctggttctgggcgtcgtcggcaagcgggcctaccacagcgatgcgcttggccttgtttgcggcgaacggcagggcgccgtcgttgcgcagcagggcgacggattcgcgggcgagctccaggttgatttgctggtgttcggccgaaccgatgaccgccttgatacgttcggcgtccggcagacgcgggtcttcgaacaagccgaggcggaatttcagagctaggatgcgagctactgcgtcatcgatcagggattcgtcgagcagaccggtttttacggcttcgatggctccctcatagaactgtggggtggtcatgaccaggtcgttgccggccttgaccgcgtcggctgcggcgtgcacgtaatcgggcttgacatgctgctcccataccgagcggccgacgttgtcccaatcggtgatcagcgtgccattgtagtgccatgcgccgcgcagcttgtcggtcagcagccatttgttgaacgtgaccggcacgccttcgatggactcgtagccgagcatgaacgtgccgcaaccttctttggccacgcgctcgaacggcggcaggaaccaggattcgagcttgcggtgggagaggtcggcttcggaggcgtcacggccgccttgggtttcggaatagccggcgaaatgtttggcgcaggccaggatcgcgttcttcggcagggcctcgccggccttggcgccgccttgatagcccttgaccatggcggaggcgagttcgccgatcagcatcgggtcttcgccgaaagtctcatccacacgcccccaacgggtgtcgcgggcgatgcacagcaccggggagaacgtccagtgcacgccggtgcaggagacctcttcggcggtggcgcggccagcggcttcgactttggcggcgtcccagctgacggccatgccgagctgggaggggaagatcgtggcgccgggccagaaggaatagccgtggatgcagtcgtcgccgatgaccagcgggatgttcaggcgggtctgctcgttgaccatcttcaccgcgcgcggcaggtcggccgggctggtgtgcaggatggagccgacgtgcttgttgacgatgaggtcttcgaggtcgccgctgcgtgcgtcgagctgcatcatctggccgaccttctcttcgagggtcatgcggccgaccaggtcggcgatgcgctcctcggcgggcagggcggggttcttgtacggcatggtttcggcgtttgcggaggttgcggtgttgtcggtcatgcggtgtcgctttcttcggtgaaatcgaacggttctttagttaccgattggtagtttagcatgcctaatgacgaaacacgctgcgaatacacggttttctgacaatctaatttctgttagatatcctgcaagcaccagaacgcccacctatcgcaagaaagctcagcggtacccgtcccagagcggcgaggggaagatcatgggctccagatcagcccattcgtcgttgagatcgatggccggcacccgcaaccagcgcaactgcaccccgtccatgatctccagggcgcggcgcaacgtggggcggatctcctcgaacgagtcgaattcgggaggcaggttccagtcgtgtatcgaatagtagtgccatatcgaatcccgacggcccgcgaattcgtcatgcagcgggtggtcggggttgaacgattcgacctgcaggatggagaacagctgcaccagcatggggcgtttggaattgtgccacactaggaaccgcaggtaggcgggcagccgcaggtcgccgggtgtggagccgggcagaccggtagtcatgaagtcctcgatgtcgccggacatgttgtagttctcgtggtacaccgcggcgagcagattgtccttgctggggaagtaccgcagcacgccctgcttggtgacacccaccgcatcggccacgtcctgtatggaggtgccgttgtacccgcgttcggagatgaggcgtacggcggcatcgaggatttcctgccgacgctcttccggcaacttgcggattcgcttaggccgggttgtggcttgtgtggacatacccgccagtctatccgcagcccgccctcccgcacgccggcccacacactccagcacggccgaacatacgaaagcggtgcgcagacagggcgttgtgccctgcctgcgcaccgatacgggcgtgggcgctagtcgatcacgaaggtgttgaaggagcgcggggcgagggtggctttgatgccgcgggaggcgtcagccgggtcggcgaactcgaacggcattgcggtttcgagcgcgttctggaccacgacggcaatcgtgccgtccgggttgcggaacgcgatggccatggagttgaagtggccggtggtgccgagcactttagcgccggggcgcacgtactgggagaagtggcgcatcacgtagtattcggggttgcggcgcacctcatgcgtgtcggcggtaatggtgaacagcgagttctgccaccagccccacgtggaatcccggtcgtcgagaatcatgttccagtaggtgtaggcggtcgcgccgttcttgaggtagtggttgatgaggtggaacacgtattccgcgtattcccacgtgttctggccgtcgccgcattcggattcggactggatgagttcgatttccggccaggattcgtgcgtgcggacgatgcagttctggcccgcccactggtaggcgatgcccttgatgtacttgcgggcaccgtcgtcgaagaggatgttgtccacgaaacggttgtagttgttgagcctcatgccgtagccgccaccggtccacgccatgtcttccgggccgttgagcgtgccgagccagatgtcggtatcgagcccggcggcttcgaattcggggcccagatagtcgcggatgaacactttcagggcttcggcgtcccacagggcgctcgggaacttctggtcggcgaacacctcgttctgcacgtgcagctgggtgacctcgatgccgtgcttggcgtactcccgcacgtaacgggccagatacttggcgtaggccttgaggttttccggggtctgcacgagccggccgtagttgtaggccttcgggcgcttcatccaggtgggcggggaccacgggctggagaacagcttcatgtccggctgccattcctgggcgcggtggatgtacgggatgagcgtctcctcgtcgcgttccacggagaagtgctccatgtcgtagtcaccgtcgacctcgtcatagctgtaccagtggtcggcgaagtcgttggcacccacgggagcacggttgaacgtgaagttcatctcttcggggtcgaaaagctccttgatgatctggtcgcgttccgcctcggtgacggtctgcaacggcagccagccgagttcgttgaagcagccgccgaaaccgcgcagcgcctggtattcgttgccgtcgagttgcaaatcaggtgcggtggttgcgccagtggcagttacctcacccgaacgatcgacgagcctattgtcttgagtggtggcaatccatgtggtcatggtgaaccccttatcatgttttccataggctggtcatccgttctgccatcacagcagacaaccagcctatacacagcacattcgtcaggcgaggcgaatgcgattcgaaccgggcttcagagactcaaccggcccaggcacgggatgcgcacctcgtgcgataccggtcacatcgcgattgataacaatcggcgtaccgtcatggttctcataatgttgccagacaatacgcggaacaccgagtttcgccgtatcgatatatgaggtatcaacctcgaatactccagaaggaatctctccttccagccacacagaaccatccgcgtcttcagtcacgacaatatgggcatcaccattgtcagagaatcgatgttcttcgcgatcaaaagattgcgcaccgttaaggtatacgttaccgtccacatacaccggttgcggcacctgttcgaacagctcaagatcgccaatgccctgcgcatgtacgcgcttcatgtattcgttttcactagtaggtgcaccatcataagtctcagtaccgcgagaggtgacacccggcagataggcatcgccacccacaaaaatgttctggtagatgcgatcgtcaccgctgtatacgcaggcataaccagcgacctcagtggagtgaggcagatgatagggcgtaaaccgattgagcgtggcacgacgttgcgtcgagccacagaataggttatggaccaaagcggtgccttgggccacattgtcgaagttgtaatcagacccgaacacattgttgtccacgaggcacgggccggaggtcacttcaatcatcaaatcacgaatattggaatggaatacattcgaagacacgcgtgtgccttgagcctcccaatccaaccaaatgcccaatgagcagtcatggaaatgattgttgcgaatctgcgtgtcaatggcagcgtgcagtttgacaccggcgatttcatgaccgaagaattcatggcgctcaccgatgttgtagatggtattgttctcgataatcgaattaacgcatcccaaatgaccgaccacaccattttgcccgcaatcgtgcaaagtgttgttgcgtactatatgcgacccaatcgttcccatgtcccatccgttgtgccgcgccctgaacacagtttccaattgggtctgataccctggcttgcgcccccatcgagttgcttcgttatctccagtggagtcttcctttcccaagctaatggcactgcatcgagcatcgtggatatcgttgttttcgatgatccagccttttgcccagtgcgggccaatcagaccaatctgatcaccagtcggaggggcccaaggacaagcggcctgcgccatttcgaaaccacggaccgtaatataattcagcccagttcgatcagggaagaaacatgtgcgacgtacattaatctccaccaattccgcattcggatcatagtcatggaagttaacccagaattcggtagtgcaatcccctacttcagcatgccactgataaatggtctcctccgggcgtgccaccggttcagtgatattgacccaatcggggccgaatccggtatcgcgccgctccgccgccttcacagcttccacgctgggagcttcataaagggctttgccgttgagatacacattgcccaaactaagtttccaatcggacggacgttccaaccaatcaccttcgagaggcaaggcataaggattgcagccatgaaaaacgtcattggctacgctggcatgccatatggtgccgtcgaccagatcccaattacccagtatctccgaccctttgatgatggcatgctcaccttcagcaaccgtgtaagtgatacgtgaatattcatcgtatccgccacgcttgggattcacgttctcgcgatatacacccccatgcacgatgacgacatctcccggctgggcaatatcggctgctgcttggatggtattcaccggcgtgtcgcgagcgccatctcctccttgcaaggcattgcaatcgacgtggatttccttgatttttgcggcgtccgtcatattggttcctttcagcactcaccattgatattcggcatagtatgtcaccaagcgacttgcacttagcaactactaagtatatagtataaccatcttccgaaaaagggagacacacaattccaatgacggaagatgcaccttaagcaaaaaggaaatggactcaaggaggagatccttatgaagtcaatgacaaaagccattgcagcactggccgccacttcgatgttggtatcgcttcccgcatgcggcaataagcctggccagaccggcaacactcaggccacgggcgccaatgtcaccacttgggcaatgaccgattccccatgggatccgatcaaaaatgcattcaaggaatggaacaaagctaaccccgatgctcagatcagtgaggaaagcttcgccaatgatgcttacaaggagaagattcgtaccgccgtcggctcaggcaatgcaccgaccttcttccccagctggggtggctctcctctcaccgactatgtcagttccaaggccgttaccgacctaactagcgatcttaaggacactattgatagcaaggtgttcgattccgtttccgccgaaggctaccgagacggcaaactgtatgcagtgcccactggtcaggcgcagccggtgcttttcttctacaacaagcaagtgctcaaggatgctggagtcgacgaagctccccagacttgggacgacctactcgatgcagtggccaagctaaaggctgccggcaaaacgccgattgccctagccggtggtagcaagtggccgtatctgatgtgggccgcatatcttgtggaccgcatcggtgggcctgaagtcttccaaggtgtactcgacggcaataaagatgcttggagcgatccagccgtaacccaggcgatgtccatgattcaagatctcatcgatgccggtgccttcggcaacaactaccagtcgttgactgctgacgaccgcaaagataccgcgatgattgcgaccggcgaagcaggtatggaattgatgggctcttgggtgtacgccgacctcatctccatcaatgacagcttcaccgcagacgaccttggtttcgcaccgttcccctccgtcgatggaggcaagggcgatatgggcgatctgaccggaaatctgtcaagctactggcagctttcttccaaagcgacagataagcagaaggataccttcgtcaacttcatcaaggaaaagaattactctgacaccatggtggatgccatgttggaacagggacaagttcctccggtcaagggcattgaagacaagattgccgcagctgacgatggttccggctattacacctggatctacgattccgtcaagaatgcaccgaactaccagctttcttgggatgttgctcttccgagcgaccaaggacaggccgtgctgaacaacctcgagcaggtgttcctcaagaccatgaccccggaacaattcgtcgatgccatgaactctacgctcaagtgattcacgcaatgaagcaatagataggacgataaggaggatgccatgagttccaaggtttcgaaaccagctaacaataagccaaccgtattgcataaaggaccgtcagtctggtatgcggctcccgcactggttctgttcggaatatttgcaattattccgctgatcggtgtggtggtactgtccttcatgaactgggatggtctcggcgcagttaccttcaacggtatcggcaactggaccagaatgcttaccgaccccttggtcctcaacggtcttcgactgacgattatcctgacgattgtcagctgggccgtacaaacccccatctgcatcctccttggcgtttttatggcggggaaacagaagtatcgtgcattcttgtccgtcttctacttcattcccctgctcttcagctccaccgcagtggccattgcctttaagaacttgttggacccacaattcggcatcggcaaggcattcggcgttgactggctggcccataactggttgggcgacccaaataccgcgctgtgggtacttatcatggtggtctcctggtgctttattccgttgcactctctgctgtatcaaggcgcagtccgccagattccgcaaaacctgtatgaggccgcgatgatcgacggcgcaggccctatgcgccagttcttttccattacgctgccgcaaatcaagtacacattcgctactgattccacgttgatgatcgttggttctctgacctacttcgatctggtctacgtcatgacgcagggaggaccaggcaacgccactcgtattctgccgctcgacatgtatttgaagggcttcaaaagctacgacatgggcggagccagtgtggtcggtgtcatcatcctcgcgatgggcattatcatctcgttgctactgaacaagctctcaggatcagacaaaatggaaagtcagatggaaggcgtgtgattcgaccatgattcgtatcaagaacaagcaatataacattctcggcggcttccttggctgggtatggctcgccaccgtcatcgtaccggtgtattacattctgattacttcggtcaggcaacagaatgatattttcactgagaatccgctctcgctcccctcaaaccccacttttgatgcttataagcgcgtgtttgagaacgatttcctgttgtatgtgggaaattcggtattcgttaccgtcatgaccgtgcttattatcctgatcgtctcgttcatggtctcctacatgattgttcgtcgcaatgacgcatggtcgcgcggcatatacaaagtcatcatcaccggcttggccatcccgatgcaggccacgattattcccgtgtactacatcattattcagattgggctctatgacaccttatgggcactgattctaccttcggcggcattcgctattccaatcagcgtactgatcatgaccaatttcctacgcgatgtgccactgtccctgtttgaagccatggctgtcgatggtgccagcgagttcaccactatggttcgactcgccatcccgatggtgaagcctgccattatcaccgtggcaatctatgacgcactgaacgtgtggaacggattccttttcccgctcatccttacccaaagcgcatccaaccgcgtcatcccgctgagcctatggcttttccagggccagttcaccgttgacgtgccgggcatccttgctgcagtcgtcatcagcgtactacccattctgacggcatatatcttcggtcgccgtcaaatggtcgcaggcctgaccgccggctttggcaagtaatcacgccccctcaaaacctgatccacaaacctcttccgaaatcaggccatgagcgtccgagcggagtcccgcccagacgctcatgtaatctcagaggatgttttcgctcgaatgcgcgttcctgccatatcgttaagttcctactaggacgtaacatatcgaagaataacggcttatccacgccaccctaatatcgcctctatgtgctgtccaaagaaaggaacgtcatgcgtcgtcgtaccggaacagacgcccccaaaaaaatgagcgcagagaatcgtcgaaaaagcatcctcgaaaccacgatgacgtttatctcccaattcggcttctggggattcactattcgcgacgtggcccaagcccaaggcattaccgaagctggcttgctgtactacttcaagaataaagaagatcttatggtcgaagcgttaaagtacgccgatcacgtcaatcagattgccattgccaaatatttgggggtagaaggcgtttctggtgatatcaatgacggcattacttatcactgcgattatggtctcagaaccatttccacggctacagcagaaaccaacgccaatcgtcgtcagttagtgagtctttatgtgctattacagggtgaagcattaagtgaagaccaccctgcacacgagtactttcagcttcgcgagaagaacgtcttgaaagaatatgccgtcgccgctgcacgagaccatgtgtccaatccggaacgcactgcgattcaggtgctgggagccatggacgggttgcaactgcgctggctcagcagcggctgcgcactcgacttcgcagaggaatggcggcagcttatcgagctaataattcccgacccgacacattgaagtgtgagtacgtcaaataaaaacaatgcaacgaggtggtgacgttttcttggactccctgaccgggaggagaacccctcatggcgacgtacggcagggagcagcgcgacagggccgtggacctgtacatcaaatacgaacgctgcgccgccgacgtgatccgcgagctcggccatcccggcaagggcgcgttgctgtcgtggtacgcggaccagtgtgttttgatgctcctatacattgtcaagcgtttgggtgtgttgttttgggttggttgtcgagtgtatccattggatggcccgttgctcgagttcgggaaggtcgcgtgcgccgcattcgatctcgctgtggattggctataatgtattagacggtccgatgagggacgattgacatgaggttggaggccgacgatggccggcccgaagcatccccgccactacgatgaggcgttcaaacggcagatcgtgcagtcgtaacgggagcggcaagccatcccgggagatcagggccgagtacgacatcgcgcgatcgaccctgcagcgctgggtccagggcatccgcagcagcggctccacccgggccgcggacaaccgcacgcccgagcagaacgagccggccgggccggggaggcgtggccggcggttggagatggggggtgggcgtttcagaacaagcggcgccggtattcgcacgaaggcaggcgtgatacgggccaacgccgcccgctgcccgatatcggcgcgatgcgggatgcggggcgttccccgctccacctactactggatgaccgggcatcccgagacggagcgtgcggatccgatcgccggcgacgtgcgcgcggtccggcgcgacggcctcgaacgctacggcgccaggaagatcaaggccgctctggaaaggaggggcgtcaccgcgtccaggagacgcatcggcaacatcatgcgcgaacagggcatgacgagcgcgtacgcgcgcagacggtccgaaccgcacaagacgcgggccgacgaggccaggctcgcgaacctgttggaccgcgagttcgacggctacgccccgcacacgcacctggcgagcgaccttacctacgtgagggtcggcaacgggtgggcgtacgtgtgcctgctggccggcctggcgaacagggacatcgccggccattccgtcgggcggacccgggacgcgagcctggtattgggcgcgttcgccacgctcgacttcccgctgacggacgtccaggtgttccacacggaccgtggaagcgagttcgacaacacgaggatcgacgagctgctcgacgtgttcggcatcaaaagatcgctgtcacgcaagggtaacccctatgacaacgccgtggtcgagccgacgaacaggctgttgaagaaggagctcgtgtaccggaacagctacgccacgatcgagcagccggggcgcgaccccgacgactacgtgtggcagtccgacaaccagcggctccactccacccccggataccggagcccgaaggaattcaccgaacaagggctcgtcctctaaggaactgtccaacacaccgttgccaatccaatcatgaggctcatgaccaggcacggcctagtgcccctgttcaagagcgcgaagcggtacagctcgtacaagggcgagctgaccaaggcgccgaagaacctggcgaaccgcgacttccacgccgagcggccgaacatgccgtgggccatgaacctcacggagttctccatccccgcgggaaaggcctacctgccgcccgtgatcgactgccatgacggcatgccggtcgccgcaccagcccggactcggcattggccaacggcatgctcgccgacgtctgctccacgctcaaggacggagagaaaccaatcatccattccgaccgcggccgccactaccggtggcccgagcggatccgcatccgcacggacaacaacctgacgcgttcgacgggcgcgaaaggctgttctccggacaacgcggccgcggaggggttcttcggccgtcccaggcaggagttcttccgcaagcgcagcttcgcgggcgtctcgatggacgggttcatcgacatgctcgacgactacatggtccggtaccgggacaggcggatcaagacggagcccggacacgggcatcatggatcgtcgacgcgagctcggtcttgtggcatgatcggtggtgatggaatcaatgacgagtccaacaaaacgtcaccagcccccaatggcagattagttgtacatccacaagcaatctgccattgcgcaacatagtaaccgacttctttcctcgatcgccccaactacttctggaacacgtcggggtgcttcgggtctccggggatgtcggacagaaggccctccagccccaggaattccttccagaagtcgagcggctggccgtacggcgtggcttcgcggccgtgggcctgaatgttggccttggcctcgaacacctcttcctcgctgatgccctcgaagtagctttccaagcggtcgcgatgctcgggcacgtagaacagagaggacacaatctccgtcagacgttcggcacgctcgatcggcaaggaatcccagtggcgaagctcgatgaagttcttcaggcgtacgtcattgaagtgcgtggagatgatgtggttgatctcgtacgggttgagttcgcggtccgggtacacctcccccgcgttctcgcggaaggccgggcgatgcagttccttgggacttgctccagaagccacagcttcaggggtatgggtcaggtcagcgaacatgagcggcgtggacagcacgtcgatggcgtaatcctccca

SEQ ID NO: 2976 - DNA, 5334 bp, Unknown
  R19_24m  MAG No. k141_9908
cccgtcgtccgctccgacaaggacggtgccgacccggcatccgtcgccttcgaggcatccgccaaggccaaggaagcgaacgcggacgtgctcatcatcgacaccgccggccgactgcagaacaagtcgaacctgatggacgagctcggcaagattcgccgcgtcaccgaaaagaacctgccggtggacgaggtgctgctcgtgctcgacgccaccaccggccaaaacggcatggcccaggccaaggtgttcgccgaagccatcggcattaccggtgtggtgctctccaagcttgacggttccgccaagggcggcatcgtgatcagcgtgcagaaggagctcggcgtgccggtcaagctcgtcggtctgggcgaaggtccggacgatttggcacctttcgatcccgaaggcttcgtagacggcattctcgcgtagacggtcgagctcccctcagcgaggggagccctgcgtccgtccacgttgtgggcgcgggaaacgcccgcaacgcaccaaacccagccccgaatcatattcgaaacatgattcggggctttcccgtatacgttggaatcatgccggaatcagcccacccgacatcaacctaactgtcagccacgcttaacaatcgcgtaacttggcgtaacgaaaccaaaacgagaccggctttaactgacaaactgttagcccccataagggggacggcattgtagagacaaataagacgccggccgcacaaagcccccggtgccctgaacgaaagagagggaggtagacatgggagcgattgattccggtaacaccgcatggatcctgacatccgcgtccttggttttcctcatgacgcctggtgtggcgttcttctacggcggtatggttcgtgccaaggccgttctgaacatgctgatgcttgaggcggccgcgctgtcggtcaccatgattatttggactttgtggggttggtccattgcatacgccggttccgacatcggaggcatcttcggcgatccggccagcggcttcctgctgaaggactccatggtcgcgcaggacggcgtgttcaccgccaccggtctgaacggcaacaactacccggtttccgtggacgttgccttccaggtcgctttcgcgatgattaccgtcggcctgatctgcggcgccatcgccgagcgtgtgaagtacagcacctggatgatcttcgtggcgctgtgggttaccttcgactacgctcctatggcccacatggtctggaacggtggtctgctgtctgctgacggcgccatctccaaggccatcggcgcggccgcccacgatttcgcaggtggtaccgtggtgcacatcaacgccgcagtcgccgccctgattatcgtgctcatcatcggcaagcgtaagggcttcggcacgcagccgttccgcccgcacaacgtgccgttcgtgatgctcggcgccttcctgctgtggttcggctggttcggcttcaacgctggttccgccttcgctgccaacggcaccgctggctacgcttgggtctccacttccgccgccactgccgctgccatgctctcctggggcttcaccgagaagattcgctccggccactacaccgctatgggtgccgcctcgggtatggtcgccggcctggttgccatcaccccggccgccgatgtggtttccccgctgtgggccatcgtgatgggcgccatcgctggtgttctgacctgcctggcctgcggtctcaagttcaagttcggttacgatgactccctcgacgtcgtcggcgtgcatggcgttggtggtttcaccggcactgtcctcatcggcttcttcggtgaaggcactggtctgctggctggtggcgactggaagcagctcgtcgttcagctggtcatcgctctcgtcgccatcctctactccgcggtgatcaccgcgatcatcgccttcgctctggagaagaccatcggttggcgcgtcaccgaagctcaggaagtcggcggcatcgatcttgccgaccagggcgaacgtgcttacgattttgctggtactgccagctctgttctcaaggaggtgaggtgagatgaagctcatcaccgctattatccagccccataagctcgacgacgtcaaggaggccctcgcggccgccggagtgcacggtctgaccgtgtccgaggccaacggctacggccgtcagcgcggccacaccgaggtctaccgtggcgctgagtacaccgtggacctgattccgaagattcgcgttgaagtgctgtccgatgacgcggatgccgagacgctggtcggtgtgatcatcaagtccgccggcaccggcaccatcggtgacggcaaggtgtgggtcgctccgctggactccgtggcccgcgtgcgtaccggtgagaccggttccgccgcgatctgataacacagacgtccatgcctagaaggggatggactgcatgggaaaggtccccgcacgccgcgaattgacgccgtgcggggacctttttggcaatgaaagatgaagcaatgacttcagcagtagatggcttgaaacaacgattcatggatatgagccagccggatgacgatggtgtctaccggaatggtgcgaccaagcgtaaagcccgcacggaactggccatgcaatgcctcacggagctgtggaatgcggcctgcaaggatgtctctttccccgtgcccgactccggcatcggcttcgccgcggtaggctcgctggcacgtggtcaactgggccccagctccgacctcgacttggtcatcatctacgagcctcgcacgttgaacgaccagcagctcaacgagttggccaacaaactctggtacccgctatgggacagcggtctggacctcgaccactccatccgcacgcgcgcccaatgcgaggaagtcaccgaccatgaccttcccgccgccatgggctggctggacgtgaagcccatcgccggcgacactgctctgattaccaccaccgccacatccatcctcgaacgctggcgcaaggccgcccgcaagcgcctgcccgaactgctcgactccgccaaagcccgactcgacgaattcggccgcctccaatacgtcaatcagcccgacatcaaggagacccgtgggggtttgcgcgattcggtgctcgtctccgcgctcgccgtctcatggctggccgaccgcccgcacggcatctacgacgaagccgtggaacgtctgctcgacgtacgcgactgcatccatctggtggccggcaaggataccaacctgatgctgacgccctatcaggccaaagtggctgccatgcttggccttgccgatccgacttggcccgaaaacgagcgtgccgcctactcgatcgacgatttgcagacgctgcttgcccgtatcggccggcgcatctccttctcgcttgattccaccgcatcccgcgctggacattcgctgacccacgaaaagccgcgattcgcgttcttccagatgttctctcagcgctctggcggcaagcgtgaagccccgcaattcgacgtggtggctcccggcgtggccaagcacgaaggcgaattggtgttggcacccggtgccgagcctgccaaggatgccaagctggcgttgcgtatggccgtggcggccggcgaattcggtttgcccatcaatccgtctaccttggttaatctgaagcactgcccgattcacgacaaccagtgggatgacgaatcgcgcgagctgtttattcgtctgcttgcatgcgggccgaatcttatggaagtgtgggagagcatcgacttcgtggacattccgggtcgatggatgccggaatggctcggcgtccgcaaccgtccgtccgcctcggccgcccaccggtacaccatcgatcggcatatggtggaggtcacgtcgcgtctgggtcgtgagacaccgtccgggggacggtatgatgacgatcatttcaaggcgttgctgttggccggtattacccatgacatcggcaagcgcgcgttcgtggccgatcacgccgccgagggtgcccgccatgtgccggtgattctcaagcgtatgggctacgcgccggacatcgtcgactgggccaccgtgctggtgcgtgagcatttgaccctatccgaatttgccacgggtaaggacccctatgatccggccgtggcggaggagttggccgaccgcttgcaccacgacaagatgctgttggatatgctgttcgacctgacccgggccgacggctcctcgctcggtgccaccgccggtgagaccatcaccaagcaatacggctggtccaagtggcgcgaacaaatcgtgcgcggcatgtattccgccgctcgcgccgcgatgtaaacggaatcgcccagcacttcgcgcggccgatacctacttcatccatgcgtccgagcgcacgcgcagcccgttggacaggccgcgcccgcccatgagcaccacgttgaacgcggcccagagcacggcggtacgcatcaggtcgctcgtcagcgccggcgtcaccatattggccagtatgagtatgagcgtcacatacaccacggcggtcagcgtgcaggtgcctgccagatagcggtagtcgcgcgcgccgataagaatgccgtcgattgccatcatccagccttgcagtgggaagaagatgcccatcgtcaccatgccaacggcaatcaacgtctgaatatttggcgtaggggagaagaagtgcccggcgaacaggccgactaccgcaaaagccgtgccgattaccgcgccggtgaccagccccgcacgcccggtcgcccgcgtcaaccgccgcgcctgctgcacgctgccagcgcccagcgttgtggccaccagcgtctggccggcgatgcccacggaatccagcatgttcatcgcaaaattccaagaggagttcacggcctgaaacccggccaacacggcagtacccatgcgcgcggcacaggcgaccgtagccaccatggccgcacgaatcgccaatgtacgaatgaacaatggcagtccgtcgcccccggctgccgcaataccggccaaacgaggccgcagactcgcaccgtccgcccgggaccacagaatggcggggattaccaggaacagccccatgaaccactgagctatcagcgtcgccactccggagccggcaatgccccaattcagcacaataacgaacaacacatcaagcgccgtgttcaccaccgcgccgcccaccgcagcgatcagcgtgatacgaaccttctgcaatcctcggaaaatgccgttcgccgcatataccatcagcatgcctggcgcacccagcacgattgcgcgcgtataggtcacggcttgttccaa

SEQ ID NO: 2977 - DNA, 26332 bp, Unknown
  R19_24m  MAG No. k141_10316
ctgattgtggacgacggttcgaaagacggcacgctggagtacgcgcgcaaactggaacgcaccaatccaggtgtcgtgcgcgcgattcaccaggagaacaaaggccacggcggcgcggtgaacaccggtatcacggcggcgaccggcatgtatgtcaaggtggtggatgcggatgattgggtcgacccgcaggccatcgacacggttctggccacgttgcgcgcgcaacgtgaggccagcgagccgatcgacatgctggtgaccaactatgtgtatgacaaagtgaccaagcgccacaagatcgtggtgaacttccgtcatgtgatggaggccggccgcgtgctcggctgggatgacctgggcaagttcggtctggcgcagtacatcatcatgcatgcgctcactttccgcacgcaggtggtgcgcgattccgggctgaagctgccggagcatacgttctacgtcgatttctattactcgtaccagccgttcccgtgggtgaagcgcatccagtatctcgacgtgccgttctaccactacttcatcgggcgcgagggtcagagcgtgcagaccgacgtgatgattaagcgtgtggatcagctgcggctcgtcaatcggctgatgaccgaggccacgcccgaacgtggtacggtgccggaggggctgtaccggtacatgattcacttcctgacgatcgaatcatgcgttacctcggcgttcctgattctctcgcgcgatccggccaactacgttaagaaaaccgagctgtgggatgcgattgacgcctattctccggccatcggcaaggatgtgcgctcgaagctgatgtcccgcgcgctcaatctgcctggtaaaaccggccgctggatcgtgcgcaacggctatctcatcgccgaacacatcgtcggcttcaactgattcggattgcggctttgccctgctgacgcgttatcagcagggcatccctattacctccccagccgaggtcttgctactcggcccaacggtcggacattgcgaagctgttgtgcatcaggttgctggaggtgtatagcacgtcgttcagcagcttggttgtatgctcgcgcaggtagtcggccatctcgtcgttggccgcttcgagcacatccgccacgccctgcacatccttctcatcgccgtggccgccatcgagcggccatgcattcgtacccgtcgattcggcatcgcttcgagcaagcaactgctcatccgtgcgctcgatgagccggtgcccgaacgcgcgcacgccttccgcatagccctcgatgaaccggttcgtctcataccaatgcgcgtcggccacgacggcgatcaggcggttcgtccaatacaggttgccggtggagacttcgggcgtggtgtcgcgcaggtaggcaggcgtgtcgttgacgttcgcgtagaacggcgcggcggcggtgaacggaccggagccgaacgatacccacatcaccgtgcgattggccgccggcacatacgggcggacctgaatcgccaccatatggccggtgcggttcacgccgatcggacggtaacggtggcgcgattccgccgtgccggtcgtgccgtacgggtcgtacggcgtgccttcgaagtgcgaggacagcaggaaatcaacgtcttcgaggctcaccttgtcttccggcacgcggcaccacgggatgtcgtcggattcgggcgtgcagcgggcggccggcgaatcccagtcctcgctggggttgaggcggcgttgcatgtaccaggcacgcggcgtgttgtagatatggtccttcggcgtcgcggtgccgaaggccttgcgcgggttgaagcgggtgggaagggcaacggttgttccgaatccggcgctatgcacgtgacggccgttggaagagaccgacgttcccattgtgcggtcaaggtgatgcgtgaccatgaactcgcgcaggtcggcgctgcataggtattcgcgctgctcgccgaacgcatcggcgaggtcgaagtcgtcgatgccgagctggttggggatcgtggcatagcagtcgtcgggcactcggcgggcgatccaatgatggccgccgatggtctcgacgtaccagatctcgtccgcatccgaaataatcacgccgttcgattcgtaggtgccgtaggtttcgagcagttcgcccaaccgcgcgacgccctcgcgcgcggtggtgacgtacggcagcacaagggtgatgatgtcttcctcaccgataccgccgggctgctcggcctgataatcggtgctgtccggcccgccgacagccggccgcaactcgaccatcgggtctgcaccgagcacgcgctcgttgacagcgatggtttcggtggcgctcatcgccacgttgtgttcgttggcaccggcttcggccagaatgccacgattattcagcacgttcggtgcgatggtgtaccggcaaggattgtccggtagttcgatttcgacatggctcagcacgctgcggtagtggcgcggctggtcgtcgggggcgacggcgacgaagcgcttgggatcgtaacggcccgagcccgaatcgtcatcgcgggcgatgatggtggaaccgtcgtaactggcatttttgccgacaagaatcgtggtgcatgacatggggcaccactctaggagccaggctggtcgaaacaaaaaatccttggaaccattgcgattccaaggatttgttgtgccccctgtgggattcgaacccacaacccacgacttaaaaggacgctgctctaaccgttgagctaaaggggcaactcttctaaaatacacaccgttttgggatatttcaactacggcgttgcgtacacgtttgcgtacgcgattggcccaacgcacggcacagcacacgcaatgtggcccaaatcgcagcccaaatcgcatatcgcctctagcgatagatagccgccggcggctacccttgtacattatgagtgaatcccccaattggagcaatcccctgcgcgattcgcgcgacctcagactgccccgtatcgccggcccgtgcagcctcgtcattttcggtgtcacgggcgatctggcacaaaagaaactgctgccggccgtctacgacctggcgaaccgtggcctactgccgccgagcttcggcctgaccggcttcgcccgccgagactggacacaggagcggttcatcgaattcgtcaaggccgccgtccgggcgcattgccgtacgccgttcaaggagtcgacttggcgcaatctggccgccggcatccgcttcgtgcagggtacgttcgacgatccggaggccttcgagcgtctgagcgccaccgtgcaggagcttgaccgcgaccgcggcacgcagggtaaccatgccttctacatgtcggtgccgccgcgcgccttcccgcaggttgccaagcagttggccgcctccggcctgtcgcgctcgtccgagggcgcatggcgccgcgtgatcatcgagaagccgttcggccatgatctggccagcgccaaggaactcgacagcgtggtatccgaagtgttcgacccgagctccgtgttccgcatcgaccactacctcggcaaggaaaccgtgcagaacctgctggccctgcgtttcgccaacgccatgtacgagccgatctggaacgccaactatgtggaccacgtgcagatcacgatggccgaggacatcggcatcggcggccgcgccggctattacgacggcatcggcgccgcacgcgacgtcatccagaaccacctgcttcagctcatggctctgaccgccatggaggagccggtgagcttcaccgccaaggacctgaccgccgaaaagaccaaggtgctttccgccgtgcgcctgcccaaggacctcgccgccaacaccgcgcgcggtcagtacgccaagggctggcagggctcgcacgaagtggtcggctacttggaagaaaaaggcatcgaccccaagagcaccactgaaacgtacgccgccatccgcctcgatatcgacacccgccgctgggctggcgtgccgttctacctgcgttgcggcaagcgcctcggcaagcgtgtaaccgaaatcgccgtggcgttcaagcgcgccccgcatctgccgttcgagcagaccgccgtgcgcgaactcggcaagaacgccatcgtgattcgcgtgcagcccgacgagggcgttaccatgcgcttcggagccaaggtgccgggcggctctaccatggaggtccgtgacgtgaacatggacttcagctacggccgctccttcaccgagaactcgccggaagcctatgagcgactgattctggacgtgctgctcggtgatccgccgttgttcccgaccaccgaagaggtgaacctcagctgggagatcctcgatccgattgaacaattctggtccacgcttggccagccgcaggcctaccgcgccggtacgtggggtccggcacaggccgacgaaatgctggcgcgcgacggccgccactggaggatgccatgatcatcgatatgccgaacacccgcacccgcgagattgcgcacaaaatcgaacagctgcacgaggagcgcggcgaatcggcgaccggccgcgtgctgacgctactcatcgccaccgaggacgcggacctagagcatgcgctggaaatcgcgaactcggccagccgtgagcacccgtgccgcgtgattgccgtagtaccggataccaatcctgccgatcagtccggcgaaggcgaaccgaacgagaccgaagtggccgccgaggtgagcgcgaatcgcgataatccggccgtcgatttgaccgacggcccgaacgatccgaacgattccaacctgaacgcccaagtgcgattcggcgcggacgccggtgccggtgagattatcatcttgcgtccgcgcggtggccttatcaaccacccggatacgctggttatcccgctgcttgtgccggatgcgcctgtagtggcgtggtggccgaccacaccgccgtcgaacccggccaaggatctgatgggtgcgatggcccgcagtcgcatcaccgacgcgctgcactccaataatccggaggccacgatcgagcgtttgcgccgcaattggacaccggaagacatcgacttgtcctggacacgactgaccgtctggcgcgcaatgctcgcctcgatgctcgatcagccgccgcacctgcccatcaccgccgtgaaggtgaccggcaaggccgacttcctgcctctggaaatgctgtgcgcatggctgcgtctgaaactcggcgtaccagtcgaaactgagttcgtgcccgacgcgcaggccgtgaccggcgtgtacctgacccgtgaggacggtgtgatctcactggaacgcccgtatgaggaccaagcgctgatctcgctgcccggccagactccgcaggaagtgtccgtgccgatgcgcaccatcgaggactgtctgaccgaggaactgcgccgcatcgatcccgatgagatctacgccgaggtcatcaacgaaggctgggatctgattcgtcactgaagtcggtagaaccgttgccacagcggcgttggcatgagttcggcaattgtggtcgagccatgccaacgccgttgctcatcgtttcctacctcatgcgatgccgaagctcatgaccgcggagtaataaagtgacatatgcgatgtcgcacaatgtacattgtgttgtcaactgacaacacatttcattgctgcaaatggctggattcccggcatgccacccgtattatgcgttgtcaactgacaacacaatccacattgcaaagtacgacacataccccatataaggaccatacatggcaactcgaaaactcattgtgtatccgaataaagatctgatgattcaggctggcgcgcaacgttttgtcttggcgctactcgatttgctcgccgaacgattgcctgatggcacgcatcgcacacgtgtggatgtggcgctgtctggcggttcggccgcacagccgttgggtttggcgctgaacgatccactggctgatgcggttgattggtcgcgcgtgcatttctggtggagcgacgaacgttttgtgccggcttacgacaccgatcgcaatgctctggaggcccgtcgcctgctgcttgaccagctggtggcggatggcaagctgcctgaatcgaatattcatgagatggcggccgatacccgttcagccgatgacatcgccgatgtgatggatcaggccgatagtgatgacgcttccgttcgcgccgccgccgatgccgcgaatgatgcgctgctggacgatgccgcgagcgactatgagcgcgagttggtgaatgaattggggccggaaccggtcatcgatctgatgattctcggcatgggaccggacggtcactatgcgtcgctgttcccgggtcatgatgaggtcaaggttaccgataggctcaccgtgggtgtgaaccactcccccaagatgccgccgttgcgcgtctcgttgaccgcgccgctgattgcccgctcgcgccgtacatggttcttcgccgccggtgccggcaaagccgaatcgctggcccatgtcttcgagcggcccaacaacccggattacccgtcctcctacgccaacggagtggacgagttcacctggttctccaccgaagaaaccgtcaccgagttgtgatggcgcctcctgtgggccggaccctgaatgaggggcccggcccacagattgtcgcagacgctcaagcctgctgttcctcgggctggccttcctgcgcccagagggtgtggaacacgccgggcttgtcgacgcggccgtaggtgtgggcaccgaagaagtcacgctgggactgggtcagggcggtgggcagacgcttggagcgcagaccatcgtagtacgccagggagctggagaacaccggggtcgggataccggcctccacggcacgcacgattacacgacgccatgcatcctgcgattcgccgatgatcttctcgaagtacggatcgaacaacagggaagccggcaaattatcgcccttgaaggcctcggtgatgcggtcgagcaggaactgggcgcgaataatgcagccgccacgccaaatgcgggccacttcggacaggttgatatcccagccgtattccttagcaccgtcctgaatctcgttcaggccctgagcataggccacgaccttggaagcgaacagggccttgcgcacgtcctcgacgaacgcggccttgtcttctccggccagatcgatggtcttgttcgggccagccagaccttctttctgagcgtcttcacgcagctcaccgtgcgaagacagtgcacgagtgaacacggcttcaccgatagcagccacaggagaaccaaattccagaccagcctgcacggtccaagtaccagtacccttcatgccggcatgatccacgaccacgtccacgaacggcttgccggtctcggcatccttgtggtgcagaatctcagcggtgatctcgatcaggtaggagtcaaggtcgcccttgttccattcagcgaacacgtcgccaatctcctcggtatccatgccgagtccacggcgcagaatgtcatacgcctcaccaatcacctgcatatcggcatactcgatgccgttgtgcaccatcttgacaaagtgaccggcaccatcggtgccgatgtgggtcacgcacggttcgccgttcaccttggcggcgatggactgaagaatcgggcccaaggtcttccaggattccgcagtgccaccaggcatcagagacgggccgttgagcgcgccttcctcaccaccggacacgccgcaacccacgaagtggaagcccttggcacgtacttccttctcacgcttgatggtgtccttgaagaaggagttgccaccgtcgacgatgatgtcgcccggttcgaacacctcttccagctgcgcgatagttgcgtcggtcggagcaccggccttgaccatgatgatggcggtacgcggacgcttcagggacgcggcgaattcctcgagcgtttcggccggcacgaagttgccttcggcgccatgctcgttcatgagcttctcggtacgcgagtagtgacggttgaacaacgccaccgtgttgccatggtgcgccagattacgcgccagattggagcccatcgtggccagtccaatcacaccaatgtttgctgtagcttcggccatgcgccttgcctttcgtttgattgtcccatcgtcatcacgcgcgtcacaaaacagcacatcagcggagggaatcattccttcaacgcttgaaagtgtatcccacttaccacccacacgcgaaggctgtcttaggttctacgcaccttctgcccgcgaagcgtaattacttgccagccattcacatacgcccggccttggaagggtcgatatgcatggtctggaagcgattggccatgtaagcgtcgctgtagcgttcgctgaaccacatcgcgaccggtgaatcctgcggctggccggccatgcgcccataccagcaatccaaggccatcagcgtgaaggcaatgtcgatcaccatcagcaccgtgcataccgcagtcagcgaataccgtactttccatggaatgcgattaatcagagccagcagtcgcggcaacagccacttgacccacaccacaccaatcagtccccagaagaacatgaattggcccgaagtacgtccgtcgatggacagccaacggccggtgtaatcccacgcggtaataccgaacgccacttccatgaaccagctggtgcagtattcgaacgcgccgccgatcaccgccgaagcgcagaagatcaagaacggattcgccttccacaggcgattcaggcacacggttaccaataccgcaccacagccgtaaatcggcgagaacgggccccacagcaaacccgcgcggtcctgaagttcaccgttatacagcgccatatggtagatcgtctccataatcaggccacccaccgaagcgatggtaaacagccagaagatattgaagaagtccagtgcaatatagcccttgccggattggtcgcggcccagcatgccggccgccaccgccgattcataatcatcgcgatcgtccatgcgtttgagcgcgcgctgcaaacggcgttcctcgctcagggagggatcggcggtcaccgaaatcacgacgagaataatcatctgaatcagcggcagcagcaggttgaagccaaggccggtcagggccagcgacagcatgccgtcggccaacgtcaacggcatcagcacgtaggtccagcgcgcggcataccggcgatgattgcgcagcagcatcacgccgaacacaatcaggcatgcggcactgactaccagcacaaccgcatgaatcgcggacaggatgaaagtcaggctcatcgcatcgacgtgcacatgaccatccagaatctcgcgcacggcatagaggatggaaatcaccataatcggcaatgtggcgagtccgtccagcagcacgaccgcgccatagatgcgcgccagaatcggtaatcgcttggcgttcgggttcaagccggcgtcgtccagttcgacggccaccagatcagccacgactgcggactcggcgtcacggttctcccgcggcttgctaggggtagtggccgtgccatcgtccttgaattcaaccatggtttcctccccacatagcgtccccttacactatcacccgattgcagttttgccgaacttgatggacagccggtacatgtctgtctacattgccggacaccgagcccgctcgctttcaggaaacatccaaaaaccatccagaaatcttgtcaataagttccagaacgcctttcgctccagccaaggcactgatggccagtccggcaccggcagcagctccggcacaggttctgatacttccggtaactccaactccgaccagtcatccagccagaacgagcagtcggccattgatggtcaatccggcaccatcgaaagctgatacaacggtttacccatggggcggtagctctctcatgaggcggtaattaccccatggggcggttagcccaaaaccgcattccgcggaataaagccattttaagccaccgccccatgggaattttaccgccccatgggccacttaccacccaatgaaggttttaccgccccatggagggcagcctcacaccaacacacacagcacacccggccacacagcaccccagccacaaaaattaggcacaatgcccagcgacgcacgataagccgctgggcagcggcgttattccgccaaagacatcatcaatcaccccattgatctccggcagccgtattacgctactacaaccgtagcgctacgattaacgtatcgctacggaaaacgtagcaatcaagcaacaccaagctccggaggtatcagtgggcaatatcttcaaggtcctcaaacgcgacttcctgcgcctgttcaaggtgccggccgcatgggtgatcctgttcggcatggtgtttatcccgccactgtattcgtggtacaacatcgtcggcttctgggacccgtacggcaataccaaaggcatcaccgtcgccatcgccaacaatgacgacggcaccgacaacgcgctcatcggcaagcaaaacctcggcgatcaaatcgtcaagcagctgaaaagcaacgaccagctcggctggaccttcgtcaccgaagccgaggccatggaccaggtggaatccggcaaggcatacgcagccatcatcatccccaaagacttttccgacgatctcgccggcgtagtgaccggcggcaagagtcggcccactctggagtattacgtcaacgaaaaagccagcgccatcgcccccaaagtcaccgacgtaggcgcgtccactgtggaccgcacggtcaattccacattcgtctccaccgtatccgaagtacttaccgaagtcatcaatacggttggcggcaaagccatcagcaccgaagacaccaccaaagccaaggccctcacggcccttgccgaggcctccggcgacgtgcagcacacacgcagcaccatcgccaagctcaccaccaaactcaccgataccccggagcagacacgcaccgcacgtcaggcgctggacgacgcgcgcgcacttggcatcgacaccgcggaaggtctggccggcgtctccaccctgatcggcactacccaagccagtctgaacggcttcgtcacctccacgtccgaagcgcttgaccaaggctcaagcctgctgagccaggccgcagcacaggccaaccaaagcgtgggcacggtagccggaaccatcagcgccgccaatcagcaggtaggcggactgatcaatacggcggaagacatcaaccaagcgaacgccgacatcatcgaccaactcaaagggctgccgaacgccgatcgagaaccgctgcaatccgccattgccacactggaaagccgcaatagcgagcttgccggcgcactgggcaacctcgatagcctgaacaccactatcggcaacgcctccacagacaccgccggattggcgcagcatctcaataccgccacccaaaccacggtgcgcgaggccaataccgctcgcggcaccatcacctccggcgccattcctcagctcaacaccggcctcaacaccctcagctcgaccgccaacactctgtcgaccggcatcacgtcgcaaggctcactcatcgatcagtcgaagagcaccctcgatcaactcgacaaagccgcctccaccacggtgaccgccctgcacgacaccgataaggcgctggccggcatgcaaaccaagctcgaaacgctggccaccgacatcaaaaccctgagcgtctccagttcactcagctccctgatcgacaccgacggcaagctggatgccgccacaatcgccgacttcatgctctcccccactgttatcagcgaacgggccgtctacccggtcgcctcctatggttccggcatggcaccgctgttcaccaccctgtctttgtgggtgggcgcgttcgtgctcgtggtcattcccaaactcgaaaccgacgacgagggcatcgacgatctcacgccaactcaaggctatctcggccgtttcctgttgctggccacgctggccgccgtccaaggcctggtcacggccatcggcgatcttgtcatcggcattcaatgcgcgagcgccccggtgtttctgctcacctgcgtcatcacctcactggtgtatatgtcggtgattttcgccctctccaccacgttcatgcacgtgggcaaaggcgtgtgcgtggcgctggtcattctgcaggtgccgggcgcctccggcctgtacccgattgaaatgatgcccgcgttcttccgtgccatctatccgctgctgccgttcacctattcgattgacgcaatgcgtgaaaccatcggcggcttctacgacggcctctggttcgcctatatcggcaaattgctgattttcgcggttctggcctttgcgcttggcctcggcgcccggccgaaactggccaatctcaaccgcctgttcgcgcgggaaatcaaggaaagcgacatgattatcggcgagccggtgcacctgcctggcagcgaataccgtgtcactcaggccattgcggcactggccgaccgcgacgaataccgtcatgccatcgaacgtcgggccgccaaattcgcctaccagtatccccggctgctgctgggtgcgcttatcgccggattcatggtgccggccgcgctcattatcgtgtttgtgctgaccaccagcgagaaaatcgtggtcatgggcacatggctggcatgggtgctcatcatcatgggcttcctgatggtcgtggaattcatgcgcgattccatccgccgccaaaccgagctcggcaacctctccgacgagtcgatccgcgccatgctgtacgggcataaggccaagcgtcgcgacacctccgccgaacgccacgaagaagcggacccgagcgccgccgttaccgcaatcatccccactattccgccgaccaaggaaggcaggcacgcacgatgaacaccatgtggaaactatttaccggcgacatcaaacgcctgaccagcaacgtggtctccatcatcatcgtgatcggcttggtgatgattcccggcctgttcacctggttcaacgtggccgcatgctgggacccgttctcgaatatgaagaacctgaaattcgcggtggcgaatgtggatgaggggtatcgttccgacctgatcccggtgaaagtcacggtcggtgatcaggtggtgaacgcgctgcgcgccaacagtcagctcgattggacgatcacgtccaaagccgatgccgtcgagggcgcacgatccggcaaatactacgcggccatcgtaattccgaagtcgttcagcaaagacatgatgaccttcttctccgacgatgtgcagcatgccgaactgacctattaccgcaacgagaagaagaacgcgctggcaccgaatctgctcaacgagggcacggacgaggtggcggcggaaatcaacaccacgttcgccaagaccatcacttcggcagggctggaaatcgcgtcttcgctggccgatcagctgtccaagcccgaagccaaagagcaactgaataccttcaacgccaatatcgccgatttcgccacacggcttgacgatacggcggatttgcttggcacatacagcgcattgaccgatacggccggcgccttgcttgacacctcgaactcgctgatcactcaggtttcctctgccgccaaacaaggaggcaaggatctcgccagcgccaagcagggagtcaccgacgtggtcggagccctgggcaccaccgctgacgcgatgagcagctcactggacgcgagcgcctccagtttcggcgcggtgtccgattccatagacaagctgtattccgacgcgaatgatggtgccaccacggccgccgacgaattggaccgtcaagccacggccattggcaagcagacggagaaatacactgaaattcgcaacacgttggccggcatactgggcaacgactcatccatcatcacggcgattgaccgttcaatcgcacggcagaacaggctgcggcaagcgctgaataaggcggcgaccgatattcgccaaggtaatcaggacgcgcaggatcagcatgcgcaggtcaaggatctggccgatcaagcgcagaacagtatcgccaatatcaagtcggatttcacggccacggtgaaaccgcaaatcgactccctgtcgtccaccgtctctgacgcctccggcatactgagttccggcgccacccagttgggctccacgctcggcgacctgaaaaggacttccgacgacgccagcgatatgctcggcgacgctcgcaccacgttggacaaggtgtccggcaaactgcgttccgccggtgccgaactggcctcgttcaacagcacactgagcaacgcactaaacagtggcgatatgagcatggtcaaagaggtgctgggcaatgatcccgaaacgctggccagtacgttggccgcgccggtgcagctcaggcgcaaggccgtattcccggtggcgaatttcggttcgtcgatggcgccgttctacacgctgctgccgctgtgggtgggcgcgctgctgatggtggtgacgctgaaaaccaccgtgtctcgccggacgcgcaaagccttgggcgatccgcggccgcatcggctcttccttgggcattacggggtgttcgcgctgattgcgctgctgcaatccacggtgtcgctcggcggcgatctgctgttcctgcgcgtgcaggccgtgcatccgctgctgtttatgttgtccggatggctggcctcgctggtgttctcgttcttcacctatacgatggtggtgagtttcggcaatgtgggtaaggcaatcggcgtgcttatgctcatcgtgcagatttcgggtgcgaacgctgcctacccggtgcagatgttgcccgacttcatcgccaaagtcagtccgttcttgccgctcacccatgcggtgacgatgatgcgtgcggccatcgccggcatctacgacatggattactggcgggccgccggaatgctgctggcgttcgtgccgccgctactgttgcttggactgttgctcaggaagccactggtgcggttcaaccagtggtatgtggccaaagtcgagagcactaaagtgctgggctagtaggtattatccgggggttgcctacaaacggcatggacttaccaccctcagtctggctttgccagccagctcccgccaacgggagcgtacgggagcatatttcggagagaagagatgacggagatgacaggtacgacggcgacaccgcgcggtgagcgcacgcgcgaggcgacggatcgcaagctcatgcgagccacgctgcagattgcggtggaccgcggcatcagcggcgtgaccatcgaggaggtggcccggcgctccggcgtggccaaaaccacgatttaccgtcgataccataatgccgacgagctgctgcgcgagatcagcgcgatgtatctggccatcccggattccgacccagtgcccagccccacgcgtgagcatttcacgcaactattgcagcgattggtcgattgggtgcgcgacaacgacatcgacgtcaagcgcgtgggcattgtattgtccagcgaggccgagttcttccagcacatcgtcgaccaggtggtgaccccgtggctggagcatgtgggggcgttcctcaagcagggagtcgcgcagggcgtgtttcgcgaggacgttgacgagaagttgctgttgtccacgattatcggatctttggtggcgtatgaggccatcgagggcaaagcgatggacgacgacaccgcctgggcctcgcgcatggccgatctgctgtggccagcattgctgaagtagcggtcttactcctgaatcgaagcctcctggcgggcgacttcgagggctttgttgaaggcgtcggaggtccagctggcaccggcgaccttgtccactttgagtcccttcaggggcttgccgtccactacgccgttgatggctttggcgaagtcgtcctgatggttcttggaaatcgtggtgaacgggtgcccaatgattttgacggtctcgacgttgccgtccttgatggtcagatggacgtcgatggaatcctcgccgaccgggccgtactggccgttgatcgagtagttgccgtccttgtagttgccggtgtccttcttgtcggacgtggtggtggacgggtcgttgtgcgatgagccggaatcggagccgtcggagctatcggagccgttcgactgggattgcgactgctcttcctgcgacttctcggtctcgcccgagttgccggcgtacgcatcgtccatcggcgtggccttggattcgccgcacccggccagcagcgcgccagccacgaccagtccggccgccgccaatgtcgcggatttcttcaacgtattcttttcggtcatattcacgctccttaagccccctctgacgagggggctgtcagcgaagctgactgggggagagaccatcagcttgccatgtattcctcacatactgctcgatgcccctgacggccctactcctcgccgccggttttcgcggccttggtggggtcagcgaaaccaatggcggtctcgccgttctgcgcgccctcgacctgtgcacccgtggaggcgggcttgccgccggccgcctcgtaggccttgcgcgcatcctcgtcattccacttctcaccgacgagcacgccatggttgagcatgatctcgcgctgcgcgcagctggcgacaagcgcatcgtgggtgaccacgataatcgtggtgccctgctcgtgcagcttgcggaacaggtcgagcacgattttctcgttcttctcgtcgaggttgccggtgggctcatcggccagaatcagcttcgggtcgttgatcagcgcgcgggccacgcacacgcgctgctgctcgccgccggagagctggccgggcaggtggtgggcgcggtccttcaggccgaccttttccagcgcctccatggcctgcttctcatcgaccaccgaatggtagtactgggccaccatcacgttttccacggcggtcaggtgcggcaccagatagaacttctggaacaccagtccgatgaggttcttgcgcacgtcggccagctgcgtggcgttcaggtcctccagcttgcggccttccagcttcacggagcccttggagggcgtgtccatgcagccgatcatgttcatcagcgtggtcttgcctgagccggaggagccgacgatggcgagccattcaccttccggcacggtcaggttgaggtcgtccacggcatgcaggtcgccgtagatcttcgagatgtggtcgagttcaagtagcatgacgtttctctttctttattcttcgcgaagcacgacggcggggtcgatgcgggtggcgcggtggacgggcgggatggaggcgacgatggcgaccagcgcgctgaacagcacggagatcagcgccacccaccagttgaatccgatggagcgttcgaacaccgccacgcacagccaactggcgagtccgtagccgattgcggtgccgataagaccgccgatcaggccgtagagcgatgattcgatgtagaactcggtgccgatggcacgcgagctggcaccgagggccttgcgcaggccgatttcgttgcgtcgctgcgagacgatcgagctgattgtggtgccgacgccgacgagcgtcagcaccagcaccaccaacgagacgatccagaacagcgtctgcagcatggtgatgatgcgggtgtcggaggcggtgatcttggtgacctgctgcgccttgacgtgcatggaggtcatgtcgttgatgctggacaccaggcctgcgaggtcgctggagccggccgaatactcgatgacgtccacgccgcgcgtgatgccggtgagcttgttgacgtcggcgttggtggcgtagatgatcgagtcttcgctgccgccggtgtccacgatgccggccacgcggaattcggtgccggaggtgtccatgatgtcgctggaaacgcggccgtctttggtttgctggtcgatcgaggagttcgacgaagtgccgttggtgctggcgttatcggatgcacggtagccgatggtgatggcggagccgattctcagaccgatggcgtcggcgatgtcacgtccgaccagcaccttgccgtcggtcggccacgagccgtcgaccacccagtgatggttgaggttcttgacctgcgccgcattcacgccggccatcacgtacggcgaggcgttgacgcgcacgttctcgtagcggtaagtggcgtatttcgcggaacccttggccttgaccatttcagtggtgtgctgcaccatcgccttgtcgatgccggccttgccgtcggcattggtcgattcggtaggtgtgacaatcaggttcgcgccgtacgcacgcatctcctcgttcatctgctgcggcacggcgaggcagatcatcgccaggcagaacagtgtggccgcgccgaccagcgacgccaccacggccatcaccgcgcgcgaacgccggcggaacacggcgctgaacagcattctgaagaacataccggtgttggtcatcggtttcctccttccacacctacgtagataaactcagcggccatggagcacctccgcgggcttgagattcagaatcgaacgaatcgaggaggcggacgccagcagcacggtgacagccagcagcacgaacaccagcacgaacaccatcggccgcatcgtgatgccggaaccgaataccacccggcctatcagctgggccacgccggaaccaagcaacgcgcccacaatcgcgcccagcagcgagattgccgccgtttcggccagcatcaggcgggataccgcggcatcggtggcaccgagcgccttgagcagtgccagctcgccagaccgttcgccgatcgaggcgaccatcaggttggccacggccacggctgcggcgatcaggctcagcacggtcatcagaatcatcacggcctgcgtcttctgcagcacattgccctgcaacgcggcgacctgacgcacctgcttggccaccgcgcccggaatcacctcttcgatctggtaggcgatcgagctcgggtaggcggtgcagtaccaggtctcccattcctcctggctcagcgcggccgggttcgcggcggccttacgggccaggtcgttctccggcgtggtcagggccttgacctcgatcttgtcgaccgaatcgggcaggtcggcgagcacctgggccgtggaggaggcgatgtagagcgagccgttgtcctcgtcgccggaatcgtagacgccggtgagcttgattttctgctcgttcttcttgcccgaggcggtggtcttgttgagggtgatggtgtcgccggtggtcacaccgagttcggaggccagcgtcttgccgatcacgccctggtcggaatcgtccttgggccacttgccgtccagctgccaccacgagcgcatgccttccacgcccacgacggtggtctcgccggtggagatcttgaggtccttgttgaaccacgtgccgacgaccggcacgttggtgccgttcaccatggcgtggatgttgagctgcggcgcgaagttggtgatgttgaacgaccagaagatcgtcttgatcttggccgcgtccgactccttcagaaaggcggtcgggtcgctggtggacgccgcgccgcccgactcggtgttgtacaggtcggaaacgaccgcgtccgccttgggctgcacggtgatgttcgaaccgtaggtggacagctcggcgttgagcttgtcgcccacgtcgaacacgacgcccagcatcgatacggacacggtcgccgacaggcatacggtcagcgcgataagcaggcgccggcgcagctgtcgggtgaacgagcgagtaatcatacgcagaaagaacatgattcttgcctcctgcctgactcactggaagtgggcgctcagcgcgtccagatccgtagtctgaatggtgatcttgccgtggccggtcttgtacgggaatggtatcgggttgcagccacccttgaagccgatggtcgccaggttgatggccacctcgcacttcttgcagatgatcttgccgtccttctcgtagtagccggcgtcgccgcagttctcgcaggcgtccaggccgatgccgtacgcgccaccgttctttcggatgatgatgaagcgcatgacggtgccgtccttggccttgtattcgaaacggtgcaggtggccgtcctcgacctggctgaagggaatggtggccacgccgtccttgagcgagtaggcttccggcggcgaaagagtgatggtctgatgggtcgcggcgacgccgacggtgagggtcagcgtgacgccgatcatggccacgaggctccagacggcggaggccacggcgcggcggcggaacgccttgtgcttgcggccgatggcttcgttcgcgccggtcagcggcatgcggaagccggccaccacggaggcgatggccggaatcaggaacacgaacgcctgggccatgatcatccagtcgttgtggttgatcgaccaggcgagggccacgaatcccgtgtggcctatcgggaaaccgcgtgcctgcaggatctgcatgacaccggtcaggtgccggacgaacagaatcaccagcaccgcgagaacggcggcggtgaacgaggcacgcaccgcggtcgaacgcatcgtgcggaagatcacggccacgatgatcgacatggccaggcccagcgcgaagccgagcgcgcgcagcagcatgtcggacgtgaagatcgggtcgccgggctccacccagatggtcagctgcaggatcacgtccggcagcgcgtagaacagggtgagcgcgatgtcgatggcggccacggcgttcgcaatgtgcatgaacaccttgtgctgctgccaattggtggtgatgcggcgtgcgaacaccaccacgacgatggtcaggatgtcggcaatgatcgcgcaccacagcaccggatagttgacgaacgtgcgctggttgatcacggccgaggcgcgcaggccggcgaatgtgatagcggcgatcaggccgacggtcaggccgatgagacgccaatgcgagcttatcggcttatctcgcccctcgccgaccgtgagcatcacgctcaggctcatcaccagcaatgcgggggccaaggtgcccggcatcactgccacgaattgttcaagcattcgcgtcctttctctgttcatcttaggctcccctccctgaggggagctgtccgcaaagcggactgaggggagtttttagaccgtcctaagaattatctccctaaagcggcgtaaagccccctctgacgagggggctgtctgcttattcaatcaccactgacgcggggtgtagtcccagttgtcgaaggtgacctcgatgggctcggtccagaacttgtggttcttgacaccggtctccgggtcaacgtggagcatccagccgttcttctcaggggactcgatggagagcttgagttggtaggtgccggccttgtcgagcttgacgttggcgccgtagtgcgggccgtcggaggcgttcatctgcatgaaggtaccggaggtggcctggccgccctcgacttccttgccggtggacttgtcgatgatggtgtagttcacagtaaggtcagggacgaagtcgcccttgccgtagccgtagtcggtgccttcctgggaggcgtggatgtcggcttccaggtggaaggaagcgtcagcagccttcagacccatggaagcagggtacatgtcgatgggctggaagtagacggcacccacggtcagcgggccagcggccttgtcttgctccttggcggtgccggaggggccgaccgggacctcttcgaagccggaggtctcagtcggggcgtcggccttcttggagtcgtccttcttggcggtgtcggaggagctggtcgaggacttggtatcggaagcgttgttggtggaaccgcaagcagccatcgaaacagccatggagccggcgagcagcacgccgagcagagcggcaagcttcttgttcttcatcatttctcttattccttctgttgtggtgaatggattattcacgacttatctgtttttagttgtggcggcgtgggctggaatcgcttccgttgccatgtcgcaagttgtgttgcgcgagatggtcgcaccgggcgttgtgctacgcctgcgcgctctcctcgtcagccttcgcgtccgacttgctcgcaccggccgcaagccgggccttggccttacgctgtttggcaaagccgaccacgaacagcgcgatgacggcgatggctgccagtacctgggcgatgatgcattcggcgtacgggtagaatccgagccagtcgttggtgggaacgcccggcaggtagttggcgggcagcaggtcgccctcgatgagcgcgtgcacgccgccgccggcgaagacaaccaccagcacggacatgaggatcgaggtgaccaggaagaacgggccaatcggaatctttacggaggtgaagcgaatcaccaggaagatgatcacgagcaccacggcggcggcgagtgcgccgaccaccatgccatgcgtatcctggctcatcgtgtagatggactggtagaagatcacggtttcggcgccctcacggaacacggcgaggaagctcagcatggcgagcgaaatcaccgtgcgggaagccaccttctcgccggattcgacctgcgaggagacagaggccaccgcggcttcggtcttttccctgatgtagcggttccacgcttccaccgaggacttgttgagcatccagttgctggtccacagcagcatgcacatggcgacgagcgcgcacacgccttccatgatctcctgcagcgggccggagccgccgaacgcgagcatgaagatgaccgccacgatgcctgcgccggccagaccggcgagcacgcccacgtagatccacttggtgaagcgcttgttgccggacttgacgaggtaggccaccacagcggcgaccacgagcagggcctcgagaccctcgcggatcagaatcaggaacgcctggccgaccgagctggtgatgaacttgaggaagccaccctcctcatcggccgcgccgccgtcgagcttggcggcatcggtggccagcatgttcttcaggtcgtcgatgtacttcttgacttcggaagcaggcttgccggtgttcatcgaggagcggcacagcttgaactggtattccacctgggagacgcggttgccgctgatggcgctcagcacggtcttctcgaagccgagcttctcgtagtgctggtagtaggcgtcgttcacgagcgtggcgcccttggcggcgtcgccaccctcataggccttgtaggcgttgtccaggatcggaagcatcgcatccgcgacttccttccaggtcttggccgtttcctcggtgcgcttcttcttggcgtcgagctccttgcgctccttggcgatctgcttctggaggtcttcggagtactgcttcgggttggcgaggctggtgttggcgtcgagctgctgggccgtggcgtcgaggtcggcggtcaggtcgttgaccttctgggtaagctgatcggcctggtctgacgtgaacacctggctttgcaggtcctggaaggcctgctgctgcgcggtctgcttgtctgcgccgatggtgtcgctcaccactttgttgaagttggacgtcacgtagacggtggtgtatgcagccccgaaatcggacttggcacccattgggttgccgtccttgtattccttaaggccttcctgcaactgcgcttcgacggccttggcaacgtcggcccaggtcgcgtaatcgacgctggtgatgtcgtcgctcttgacggtggcagcagtggcagtggttgccggcgtcacggcgaacgcggactgcggaatgatggcggaggggaggaaggtcgcggcgatcatcgcaaacagaaaaacgatgaccgcaaatgcacgagccgagaccgtggccgactgcagacgacaggcgctgcccgacttcgcgcgcacgcgagaaacggcaacgcgcgtatcacgttcccgcatcgtgttcatttcagcggactgcgcgcaggcgcgacgaaccatgctgaattcctctcacttcaagtactcgaatggtccaaaaacaactatgaactttatagaaaaaaattcttgaacaacagtcttgattttttgacgggtgcgaggtaatagaaggcgttttagtgcttttcaaccccgcaattatttcactatctgagataactatgctcagagaggatggctttcccggaatgtgaacggcaacaccacaaaaagcggcaacgtgaggaataccggaatcggataccaaaatagtgccacgggtgaggcatacagcgacagcaccgtgaatgccagcaagccgtaagcggccagtgcggggccgtagcgtcgtcgcgcaggccgcaccgccagcgcaagaccagcagccagcggaatccacgtgacgtacagggccatcgaagtcagcggattgcctttgcgaacaccgacatgaccatccgaatgcacccaccgatgaatcgcccgcaatatgtttttctgccattgcggcttgtcggaggtacccctcagcggcgcaaggtcatgttcgatggcggcaagccgtccggccgccacggtatcggcatctccgtcggaagtatgcttccaagcaccttcagtcaggaaagacgcccattgcctgagatagctaggcgtgaacaggtagtcggaatcagtggggtacgcgaaattgacgcgcgggtcccaccatccgcgagtcaccccggcataggccgtggcatattcaaccggatgcgcgaggccgagctgcgcccagacctgcagggccgcgagttgttgcgccgcggttggcctagggtgctcgcgcagagtgcggaaggtctcatcggtgcggtgcgggttgatgccggcggcggcccagtcgagatccatgatcgcgttcagtcgccgccgctgaatcttgtctatcgcactgggatcatcgtgcgcgagccgggccacgggctgggtgaccaggccccacacctcacgtccgggcgatcgattcgcatgcgtggcggccgcgcttaatggcgtccacacgccctgcgtcacaacgatggcaaccgcaagacacgcgaacgcacgacgccgcgcgcctttgggcgtgcagacggcgagcaaacagcagccggcgcatagcacgattatgagcgccgtccgcttggagacgatggtggcgaacaacaggatgacgaacgcgaatgccaccgggcggcgagccagtaccgagccgcgcgtcagacaagcctccacgaacagcacggccaacggcagatagaacacggcatgcaacgagtccttgcccatcgtggtgattgcgccgaccaccacatagttggtggcaagatagacaaggccgagaccgatgagccagcgcggcgagccgattttgcggatgtagcacagcagaagcgcgcacccggcggcgagtagaaccgcttgggtcacggtgtacagggcctgcccgatcaggggggagccgagtgcgctgccgatatgccagaacaggccgaacgtgagcgtatcaaacagcggatgctgggtgtagtagtggtgcagaccggacgattgcagatattgggcaagcgtatcgtcgcgcatcgaacccggccgagtgagtatgagccacggcagccaggcgatagcgatcgtgagcaggtaagagaggaatcgcgcgcgcagcgatgtggataacgtggtcgggcggcgggccgtgagccaactaaggatcgcggatatgctgcggtacgtctttgagtgtttcttcgattggcgcgaccggccgccatgtgctgcggttacgtcggccgccgtcccctcgttcatgactccacagcctaggcgcgattgcgggcgcgcgccgggcgaacatcgaaaattcacccggatacggtgatttctttaccggggggttgtgtaggtgcgcgcgggtgtgtgggccctgcacaagtatgcggtccttgtgcgggtgttgcgcgggactttccagtgagtctttcactcgcagtgatcattcttcacatccgcgtcgcgacacgcgccacgccgaagcgtgcacttatccgaaacctgtggtaacttattcgagttgcctgcggaacacagttcaactgcgcgctgcaaagcatggaggattcgcctagtggtctatggcgcacgcttggaaagcgtgttggtgtaacagcctcacgagttcgaatctcgtatcctccgc

SEQ ID NO: 2978 - DNA, 8572 bp, Unknown
  R19_24m  MAG No. k141_10333
gccgcgaaaacaccgatgttttccgaagccaccagagtcgacgtgatccgccgtgcccttgacaaagccggttgcaagaacgtcactgtttcttccaccgacggcctgatcaccgactactgcaagaaggtcggcgccaccgttatcgtcaagggtctgcgccagaacggcgactatgaagccgagctcggcatggcgctggtcaatcgcaagctcgccggcatcgaaaccctgtttttgccggccgatccgattcttgaacacatctccagttccatcgtcaaggacgtggcccgccatggaggcgacgtgaccggcatggtgcccgattgtgtcgtgccgatgctggccgatgccctggccgaggaacgtcagcggaaggactgatgcactaatgactatgagcgatgaccaccccactggatacgtcgatctgaccaaaccgaatgcggacgccgcatcgtccactccggagccgtccgccccggaaccgaccgcgtctacgcaagccgcgccggcacccaccgaagaggccgatgttctcgccggatcgccgcccgccgcgcctacccctactccggcacagatgcaggccaaagcgcaggcccaagcagctcagcagacccgggcacaagctcagaccgctcaggccgccggcactcgcccctcgttcatgaacgaaatgcccgacctgcgagaaaccacggacgacgacccggccacggtcaagagccgcgaggaattcaccacggtgtatgacatcatcgaccagctcgaggcggcactgggcgaagcgaagtccagcatattcgcccccggcatggtgaaggttgaccgcgacgaattcaccgaccagctttccgagttgaagaaaatgctgccggtgcagttggagcgcgcctccgccctcatgcgcgaggccgagcgccgtctggaatcggcacagacccagtccaacgccatcgtcgcctccgcacaaagccgcgcagccgacatgatcaaggacgccaacgaacaggcacagttcctggccggccaagagaacgtcaccgagcttgcacggcagaaagcgcgcgcgattcttgaccaggcacagaccagagccgaccatctgacccaaggcgcggaccagtactgcactacggtgatgaaagggctgtcccagcagctcggcaaactcagtcgggatgtgcaggccggtcttaacgtgctggaagagcgccagcgtgcggccggcgaacagatgccgcacctgacgctgaacgactatcccgaagcccagtaacgccagcagcaccagcaacatcagtaacgcgaataacgccagtaacgaataactccagccaacatacgaaaggcaccaagaacataccatggcacgagttgaagattccccgtgggccattccggtagcgcagattgcttcgcgcgccggtcaatccaagccgattgacgccgatttcccggccccttccggcattggcgacagcatcgtcggcatcaaggatggtgagcccgtacatgtgagcgggcagttcgattcgattgtggacggcctgatcttcaccggccgcctggtcgcgccattcgtcagcgagtgcacgcgctgcctgaagccgattgacgaggactggccggttgatgtgacggtgttcttcccgtatgagtcgggtcaggacaaggccaacggcaagggcggcaagaacaagaaggacgacgagatcgacatcatcgccggcgaggacgagtcggaagacacgtatccgctgcgggagaacggcgcattcgcggacatcgaggcgatgatccgcgacacgctggtcgaatcgctgccgttgcagccactgtgccgaccggattgcaagggcctgtgctcgcagtgcggtgccgatctgaacgaggatcccgaccatcatcacgatgtgacggatatccgttttgccggattggcggggctcaaagcccagctcgaggccgagcagaacggcgagcaggccgagtgacgcgcgcctgaacggagtttgtacgagctatgcgttaagataacggacgcttaagctcaattgttcgaacgaaatagaggatactcaaatggcactgcctaagtacaagacctcgcgcgccaacacgcactcgcgtcgcgcgaactggaaggccaccgctgctgcgaccgtgaactgcccgaactgtggcgctccggccctgccgcacatggcttgcccgagctgcggtaactaccgcggccgcacctaccgctccgccatccagccggctcacaccaagtgagtcctgcgataacggcttgaatgaaggccctgccatcgacgggtggcggggtcttcgcataagtgcaccattacgtacaccatcgcatcgcaaacaacacaacacaacacacaacacatcaccatcgcgtgaaggaccatacaacaatcatgagcaatgaaaccccacagcagccgacgccggccaacgagcttcttgaagcgttgggcaccactctcagcccggatctgctcgtgcaggcactcacccaccgctccttctcgcatgagcaccccggcgtggccaattacgaacgcctcgaattcctgggagacgcggtgctcgaactggtctccactgaaacgctgttcaccattcacccggatatgaccgaggggcaactggccaagatgcgcgccaaggccgtctccgaagacgcgctgagcgccatcgccaaaaccaagctcaaggtgggcccctacattctgctgggtcacggggaaaccgagcagggcggcgcggagaagaactccattctgtgcgacatcgtggaatcgctcatcggcgcgaccttcctggaacacggcatcgacgaggcacgcaaggtgattcaccggcttattgacgacacgctcgccgaagtggccaccgagggcccggcacttgactggaagacctcgctgaccgtcaaggcgcacggcctcggcaaggatgagccggtctaccatatggaggtctccggcccggagtacgcgcagatcttcaccgcgcgcgtctcattgggcgagaacggcgacatcatcggcatcggtaagggctccagcaagcgtaaggcgcagctggcggccgccgaagcgggctggaagtcactggactcgctcaagacgcggactaagtaagcccgctgtcagatttgcgaatagactgataccaacatgagcgacgagtcgtgccggggccacaagtctcggagaagcgactggaatcagacacgcgggcacccggccccatcccaaggtcgggcaggttcgcggcaaaatctatgaggtgagaggaatcatggctttacccacgcctttgcaggcattcagcggcgtgccgaaaatcaacgcggcccccgataagcagaccatcgtcgatggcgagaagatgactggcgcccaagcgctggtgcgttcgctggaggatctcggcgtcgaggacgtcttcggcattcctggcggcgcgattctgcccgtctaccacgagatcaaagacaacacgaagttccgcttcgtgcttatgcgccacgagcaggccgccggccacgccgccgaaggctacgcactggccactggcaaggtgggcgtgtgcatcgtgacttccggcccgggtgccacgaacgtggtcacggccattgcggacgcgaatatggactccgtgcccatggtcgtgattaccggtcaggtgggcgtgcaggccatcggcactgacgccttccaggaggcggatatcgtgggcatcacctacccggtgtccaagcactccttcctcgtgacccgcgcgcaggacattcctcgcgtgctttccgaggcgtactacatcgccaacaccggccgccccggcccggtggtcgtggatctgaccaagaccgcacagaccggcgacatgtactactcatggccgcagcgcatgattctgcccggctacaaccccaccaccaaggcgcacggccgtgtgctgtccgacgcggcgaagctgttctctcagtcgtaccgcccggtgctgtatgtgggtggcggcgccgcccgctccaacgccggcgcacaggtcaaggctctggccgacctgaccggcgcccccgtggtcacgaccctgcccgcacgcggcatcattcccgactccgacccgaagaacctcggcatgctgggcatgcacggtacgattgccgcaaccggtgccgtgcagcgcgctgacctgcttgtggccatcggtgcacgtttcgacgaccgcgtgaccggcaagctcgacgccttcgcaccgaccgcccgcgtgattcatattgacatcgacccggctgaaatcggcaagaaccgtcagcccgacgtgccgatcgtgggcgatgcggctaccgtgctcgacgacttgattcccgaaatccagcgcacgcaggccattcagggcaagccgaatctggccccctggtggaaggcgatcgacggctggcgcgaggaatacccgatgacgtgggatgagccgaccgacggatcaatggccccgcagtgggtcatcaagaagctctctgagatggccgatccgtccaccatctgggtgaccggtgtgggacagcaccagatgtgggcttcgcagttcatcgatttcgagaaccagcacgcttggatctcctccggaggcctcggcacgatgggctacggtctgccagccgccatcggcgcatccgtgggctcggcccgcgagttcgagggcaagaagccggtgtggctgatcgatggtgacggttccttccagatgacctctgaggagctggccgccgcgttcctggaccacgctccggtgaagatcgcgattctgaacaactccgtgtacggcatggtccgtcagtggcagacgctgttctacgagcaccactactcgcagaccaacctgctcgatggcgaggcgcacggtgccgatggtgcggcggcactggtcgacggcgatgcgccgctcgaagtgcctgatttcatcaagttggccgaggcatacggctgcgtgggtatccgcgcgttcaccgaggaagaggcgattgccgccatcgaaaaggcgaaccagatcaacgaccgcccggtactgattgatttccgcgtgtggaaggatgcgatggtgtggccgatggtagccgccggcgcttccaacgacgaggtgacgtacaagcccggcatcaagccgctgaccggcggcaccccggctccgggaaccggtccggacgagcatgcgaccggcgtgttcgagcacgagaccgccgctgccgctgcgagcgagcactgaggagaggagaacactcatggctaactatcctgcatcccagcctggttcccagcgtcatacgctgtccgtgctggtggagaaccgcccaggcgtgctggcgcgtatcgccggcctgttcgcccgtcgtgcgttcaacatcaactcactgtccgtctcccccaccgagcgtccggacatctcacgcgtcacggtgaccgccgacgtggaggccgtgccactggagcagatcatcaagcagctcaacaagctgctgcatgtgctcaaaatcgtggagctcgacccgaactccaccgtggaacgcgaactggtgctcatcaaggtggccgccgacgaatccaaccgttccgacgtgctggagatcgtgcgcctcttccgcgtgcgtgtggtggacgtgaatccggaatcgctgaccattgaggccaccggtgccgaaggtaagatcgatgcgctgctggggcttttggagcattacggtgtgattgagctggtgcgctccggtgccgtagccgtgacccgcggcccgcgcgccctgagcgaaaaggtcgtcggttccgaggttaccgggcgctgattcggcgactgcggggagacccagtccaagctcaaagggcggatgtgcatgatgcatatccgcctttttcatgcgtgcatacctcatcacccgtgctgcaagcaaaatgacagcaccttatgctagcattatgacagcaacaaggaggtgcatcatggcaacattgaccatccgaaaaatacccgatgagcagattcaacagctcaaagaagtggctgagaaaaacaaccgctccatggaatctcaggtgcgatccattcttgaagaatggctggccggcacggtggcgcatgaaatcacacgaaagaccaatttctacgacgagatccgcgaattcatgaagaacatggattttgagggactcgacaagggggaactcccactatccgagcgaaattccgccgattcccgaccgccagtatcttttgaataggaatcggccatgattattctggacaccaacgtcatcagcgaaatcatcaagaaacagccagacgaacacgttgccaattggctgaggaaccaagatacaagcaatctggcaaccaccgccatcaccgtcgccgagttgttggtcggaatatgtcgcatgcctgaaggcaaacgacgaaagtacacagatacgaccgtcaagctggcgcttatgacattagaggacaggacgttcgcatttgacacccaggcagctgcggattatgcccatatccttgtcgaacgcgaacgcaggggcacacctaccagtattcaagacgccatgattgcggcaattgcctgttcctgggatgcggccatagccacgcgcaatatcaaggacttcgaaggtaccgacgtggaattgattaatccgtgggagtttgcatagcggtaggccccggcaaactaccgaggccttgtgaacgttacggtttctcccgctactccaattgttcggagagttcgagccattcggcttcgagattatcgctttcagtattgacggcggtgagttgttcattgagcttgttgagaccctcgtagtcgctcgggtcatgggcggccatctgtgcctcaagttcggtcttccgctcttccagtttggcaagcttgcgctcgatggcattcacgcgcttggatgcctcgtggaaggccttgccggtgagcttcgaggtggagtcctcaccgttattggctccctctgacgagggagctgtccgcgaagtggactgagggagagatgcagcaacattgacggcggccgccttacccctaccagacttcgccgagctgctaccggtgcccgcgaagccaggcgtgtcagccggcaatcccttgccgttcttaatagcctcaaccatatcgaggtaatcctgcacaccaccgggcagatggcgtaccttgccgccaatcagcgcgaactgctgatcggtgacacgctccagcaggtaccggtcgtgggagaccacaatcaacgtacccggccaagtatcgagcaggtcttccatcacggcgagcatatcagtgtccagatcgttgccgggctcgtccatgatgagcacgttcggctcgtcgagcaggatgagcagcaactgcatgcggcgcttctgtccgccggagaggtcgcgaatcggcgtcatcaactgggcggattcaaagccgagacgctccatcaactgtcccggcgttacttccttgccatccacaatgtagctcggcttatagcgggaaagcacttccttgatcttgtactggcccagtttctccagctcatcgaggcgctgcgagagtacggcgaacttcacggttttgccgatgttcacatggcccacggtcggagtaatcgaaccgtcaatcaacttcagcaatgtggacttgccggcaccgttcgcaccgacgatgccgaaacgatcgccggggccaatcagccaagtcacatcgtcaagaatctcgcggccggaaaccgtcaccttgcgtgcagccgaggtgacaccggctgcagcagtgtcatcatccgaattcgttgcagcagtgtcaccgccgatggtttcaccacccgtgttcatgcgacgaacctcgcgatcgtcagcaagctgcggattgccgctctcagcctcggctttcttacgcgcttcctcagcggcctcgacggcttccggcacgccggcgtccaccaggcgcaggtcagtcatgtcggtgaccgccacctcaacggaaccgtgcagctgcggctcggcgtacatggcgttgaccacatccacgcgggaagcggacgcggagagcgccgccacatccgggtcgatatcggccatgccctgcggtttttcgaaaatctgcgtcacgtcgaccaaatcgaccacctgtttgccgaggcgtgaggtggccatttgcttcagttcaagtgtgttacgcatcggcggcacatcggcaatcaattcgcgtgcggccttgacgtggaacttctgcttggtggaacgggcacgggcaccgcgggaaagccatgcgagctccttgcgggccagattgcggcgcttcgtttcacgcacatcagcctggcggtcgcgttcgacgcgctgcagcatatacgccgaatacccgccctcgaacggctcgatcacgccatcgtggacttcccacatcgattcgcagacctcgtccaagaaccagcgatcgtgggtcacgagcaacagagcgccctggcctttggaccagcgtttcttcagatgctcggcaagc

SEQ ID NO: 2979 - DNA, 24882 bp, Unknown
  R19_24m  MAG No. k141_10410
ggtgacgccggggcagatcactgcattgccgcccagccacacattgttgccgatggtcacgtcggcgttgtgctgccagccttccagtcgaggcttgcgggcgatggcgtggtttggcgtatagatgctcacgcgcgggccaatcaggcaatcggaaccgatggagatcgggccgccgcccacaatcagcaggtccatgttgatgaacgtacggtctccgattttcaggcctagcccgtaatcaagccggattggcgggcggaagtccacgccctcgccggcctcgggcacgagtttgcggaacagtcgctcagcttcggcggtgtcttcagagtagatgcgattgatgcggtcgcacgtggactgcgcctcgcgcgtaagttccggcaaaatctccgacttacggtactgcaaccagtcatcggcgaacagtttcgccacatccgggtgatcttgcttgagttgttcgagatcgtgcgccatcgattgcccccttgcatttgtttaacgattaaacaatatgattgcacaatattgtagagcgggctgagatcattaccgccgttttacgccgatcagacaacccacgaatccgccggcccattcggtactgaggaatcgcgcatcacaatctgccatgatacgagcataagtaacgtccgcatgcgcaattagtgcaatatcaggcattgttccctcatcaatactgtcaggtgcaggctgcccggcaaggaattccaaacgattgccatgcaagcgcaatccgaaccattcgttggccccaagcgctccaagcgcaatgcaccgcttatctcccctatcggtgatttcggccgtcaattggccggattccgcttccgccatgaccatgacaacatgggtggaatcctgatgcatcatcatcgtgtattcgggccgggtgaacgcggcatattcctgcccgtcgacgcgcaggaaccggtaatcgtcacggcctcgaacgccgactaggcgggtatcgtcgagctggatgagctcagcagagcatgcggcattatcaccagcagcgcaatcacacctcgcagagtccacacccctcactgcacatggcaatccatcctcgtcaacgtccacgaccaacttctcgggaagccggccaagccccggagccacgacaggccaaccgggatcgacgatatcgatacgcttattcggctccccaccgtccagcttccacgagaccggattgtgctgccatacgaccggtgccacgaacgtttcccggccacagtagctgaacgtttctccgggttcctcgcccggagtctcgcgtacgccaagacacgcgagcagccagccgacggtcggatgcagcagcagatcggcgtgcccaacgcattggactggctcccccgctcccaaatgacggtgtgtgaggatcggattgcgtttgcaagcctcaaacagccggtcatcgcggcccaccacgcttcgttcaccgtcacgcgccggctcaatccagatatcttgcgcagcaaggttcttctcaaaaccggcgagcgccgccgcgaatccgcgcggtgcgtgcgtgcgcattatcatctcactgtgctcgaagctggtgccgccctcggcggtcatcaggtagaggtaatcgcccacccggtacaaatgcggcccttcagcccataccgcatccatgccatagccgcgccaaatcacggttttatggtcttgcaacgtccacgtgcctggggcgatgggctgcgtccagatctcggtttgaccatcccactgcgggtgtaatgccgggcgcgtttgcgtccaccacactgtgtcatcgccgtcttcaaagatgtccggatcaatgccttcggccccggccacccagtacgggccgcgccatggtccggtcaactcatcggcctcgatgacgaaattgccttgggcgtcacggcagttatcaatatccttctgcgagcatcccgcagcgagcgccttcacctcatccacgcgggccacggtgcatacgatcacatatcgcccgccgatacggcgaatggtcggcgcgtacaggccgccggaatcctcgacgccatcaatgagcagtcgatgagacatcgcctcatccaccgcattcgccgtgtgcgtccacgtcacaagatcacgggtcgtatgaatgggcaaccccggcaccaattcaaacgaggagttgaccagcacgatttcctcgcgcgtcgcatcccagatccaggacgggtccgggtacatgccgcgcagcaccgggttggagacggttatggtacattcgcggccacggtcgccgcaatgttcattgtcgcttgccacaagtgtcgcctttcattccccagtgccgaatagtcaggcgactttccctgattatcaggaaagccgcctggcgtcatcatatttccatgtaatcgaaatggctgaaaatggcttctttgccgtatccggaaaggtccacggcccccaacccgacgaacgcgccggtaaagaatccgccataacgttgggccacatgatcatcggagagcacggcggcgtccagcgtcaccggaatctcatgccatgtcttgccatcgaacgaatactcgtaggtgtaggtacgcgtacgcactttggttcgcaaccatacggattcgatgtcatcaggaatggcgatggctgtgtctttgaggaacgacgtgtacgtatcgaaatcgttctgggcgacttcgattacgcgctgtcctcgcttctcgtcccaggtgatgaatgcccatgaccagcacaggtggttgtagaagttggtcaggccggccatctgcatgtagttgcttggatcgaatgtcaccttggtttcggcgttgaaatcgaacgcctgccaacggcgtcctaccagcgacagttcaaacaggtttgccagcgacccttgaccacgcaaggtcagcgagccgccgcccacgcggcccatggtctcggtgaatggcacacgcagggtgttccagttgaggtcgagttcgctcgattcgaactcgtcatgctggctgtgatccgtaggggcctcggttgcgatggcgtcggccggggcttcgacgtaacgctctcccccatggccgccgaccacgtacggccagccatcgccatcccactcgaccttctggatcgaagtctctcggccgagcgtgcaccaaccgcgcacgccatgagccggctcgttctcgtgccgccagggcctgccgcacagcgaagcgtaataccattcgccgccgggcgtatccacgagtgctccatgcccctgcttttgcaggtaggtgccgggggtatcgaagttggagatgaacggattgctcggcatgctttcgaacgaaagctcatccaaggttcgcgagcgggccacggactcctgatgctcgtattgggtgccgccttccgcacaaaacaggtagtaccagccattgatggcgtagaggtgcggtccttcgaccaatttcacatcggtgccgcgccagatggtgcgggctgtttccggcttcaattgcatggttttgacatcgaattcagtcaaggtgatgccgtcgaacggatgatgatattcacggaagtcccaggtttgctgcaccagatacttgcgtccatcggtatcatggaacaggctggcgtcgaagcccacgccattgacacggattggctcgctccacgggccgcggatgtcctcggcagtgaccagatagttcgcgcaatccttgaacgcgccattgacgattttcacgtcggtgtagataagccagaatttgccgtccgcgtaggacaggtcaggcgcccagatgccgccgccagacgggttgcccttcatgtccaactgggaaacgcggtttaagggcccgggcagcagattccagtgaaccatgtcgcgggattcatgcaaacggactcccggccaccagtcaaatgtggaatttgcgatgtagtaggtgtcgccgacgcgaatcatcgaggggtccgcatcgaacccggggagtacgggattggagatcttcatggtcttctcctcattgaaaagaaaggggccgtggaaaggaggaaaggaagaggttgaaaggaatcggcccaaagagccatgtacctttccacggcacggttatggttgctgcgactagcccttgacagcaccggtcaggccgccaacgatcttcttctggaaaatggtgaagcagatcagcgcggggatcatcgacagcgaggtgaaggccagtacctgagcggtatcgaccgaatgctgggagctgaacatctgcacgccgagcggcaaggtgtacttgctggaatcgttgagcaggaacagcggcagcatgtaggcgttccagctgctcacgaagctcaggatgccgacggtggccacgccgggccagctcaacggcagcaccatacggccgaagaagccgatgcgagaacagccgtccagctctgccgcttcttccagttccttaggaatggacttgaggaatggcaccaggatgatgatggcctgtggcaggccgaatgctatctggggcaggataatgcccagatgcgagttgatcaggtgcagattgcgcagcagcagatacaacggggtgatggccacggtgatggggaacatcatgccggcggcaaacagcgagtacagcagtttgttgaatttgaactcgtatcgggcaatgacgaagctcaccatcaaggccagcaccacaacgcccaccattgtgccaatggagacgatcagggagttgacgagttccgaccagaagatgttcgaagtgaacaccgtcttgtaattctcaaagttccatggatcgggccagccggccgggtccctcgtaatctgcgaattggtgcggaagccgccgataatgatgtacagcaccgggccaacgcacagcgccacaagcagcagtgagaagaagtagacgaccgggttgccccacggggtctttgcggattttctcagtgtatacggatcataggtcttgttcttgcccttgcctacggacggggagactgcggtcgtcattgtgaaaccacctcatttgcaactgctgcggcattgccattgaccttggcaagcttggccgcttccttcgccgcacgcttggcacgacgcttggcatccctctcgtcagtgagcgcaccttcgagatctcggttaagcacgaaccgctggtaggtcaaggcaatgaccagcgagatgatgaaaatcaccacggccacggcggaaccgtaaccatagttgttggcgagtcgaccttcgcgcaccatgtaggttgccatggtggacgttcctgcggtagacgacacgtactgaccccagatgatgtagaccaagtcgaacagctggagagaaccgataatcgacatgaatgcccagatacgaatggtggggccgagcagtggcagggtgatgctccactgctgacgccagaatccagcaccatccactttcgcggcttcatagaggtcttcgggaatcgactgcatgccggcaatcatcaggatgacggcgaagccgatgtacttccacgaaatgatgaacatcaatgtccagatggcgattttcggatcggagatccagtccgccccgccaagtcctattttcttgagtagcgcattcaatgcgcctgtggtctggaggatgaggccccagccggtgccaacgatgacttcggaaacgacgtacggcacgaaaatcagggtacgaatcagtgcgcggcccttgaatctctggttgagcagcagggcgaagaggatggccagcggcccctggatgacgagcgaagcgacgaccacgaatagcgtgtgccccaatgcctgctggaagttcgggtcggtcagaatgatcttgtagttttcaaaaccgatgaactggccgttgacggtgggcttgccatagcccttccacttgaagaatccgtagtagccggccatgaacaccggcaggatgacgaatccgaggaacatgatcagggcaggaagcgaaaggatggtgatttcgatacgtttgcgagccttgtcgcttaagcccgacgtgcggcgctgtaccctcgcgcctgctgaaactgacattgttgaggccttcctaagaaaacaaattgggccgcggttgttgctgtgcaagcattcgcgcagcccgggaattacggtcgggtcagagcgaatcagcccttggccgcagcggtttcaacacccttgacgatgtcttgggcggaaccttgaccggccatcatgttgaccacgccttcgttgagtgcgttgccgatgttctgaccgaacacggtgtcgagccacatggacacggaggatgcgtcgttgtagacggtcagcacctgcttcagagcctcgttggtcaccacatcctgggcttccttgttggccgggatggtggagaacgcctcagcgtacttctcctgccattccttctcggagacgaagttgaggaagtccacagcctcttcaggcgcccactcgcccacggccatgccatcggaaccacccatgatggcagttggatcgccttcgccaccgtccatggtcgggaatgcgaagtagccgaggtcggccatgtccttcttgtccggagtcaggtccttgatcacgccgggctcccagccgcccatgagttccatagctgccatgtggttggcgagcaggccggcggaggagcttgcgccctgctgggccggagtggtcaggaagccatcgttgaaggcatcgaggtcgagcagcgcctgcacatcatcaccggtacgggtccagcacttatcgctgaagtccttatcggactgggccttgtcgaaggtgtcagcagagcattcgcgcagtgcgaaccagtaccaccagtgggcggctggccaggcgtccttaccgcctacggcaatcggcgtgatgccggcgtccttcagcttctgcaccacggtcttgaactcatcccaggtcttcggagtttcagtaataccggccttctcgaacagatccttggaataccagatgccgccgggaagcactgactgctgcacgctgtagatcttgccatcgatggtgccggtggcttcagcagtggccatctggttcttgacggtgtcggagatcttgtcggtcaggtccatggcttgcccagcttcgaccacatcacgtagcttctggccaccacgcgccataaagatatcgggggcggaattcgggtcctgcagagcggtctgcagcttgccgtccatatcctcgttctgaatggcttcgatcttgatggtaacgttcgggttttccttctcgaacgccttggcggcggattcccagtatgccttgccgtcgccagtggtggagttgtgccacatggtgatttccaccttgccatcggcgttcgtgtcgctgccgctcccgcaagcggccatgctgacacaggttaccgccgccagaagtgcggcggccacggacttgaacttcattgtcgtctccttattgttcttgaccagcatgaaaccgatccgcgatttacgaaagtttcgaaaggtatatcagccagttacatatctaacagctggtaattaatgatgttttcagtgaagcttcgccgtttcacctaccccatcagccttcttcaactttaccgaaaactcgctttatattttcgatacctttatcataaagagccttagtttgacggtcaaacgaaatttatatcggcttttttactatcaaaatcgttgaaattccaacctttttttatctatacataccattctttatcgtcaaattgactttacgaaagtttcgaatatactgataccaacattctctgatgaaggcggtcaatgatggcgtcggcagaacagcgcaaaagcaacggcgagaacaaggtcaaacttgcagacatcgccaaacagactggctactcactggccaccgtgtccaaagccctgaacggcaaggcggatatttcggaggcggcccggcaggccattgacaaagccctgaaagacaacggctacattcgccgcgtctccccctcccgtaaacaacgcaccatcgaggtggtatttcgggattttgagaccatttgggcgctggaggtgctcaggggcatcatcacggaggccaagccgcacaacatcaatgtcatggttgcggaaagtggcgaccggcagcaccccgactcttcctgggttgaaggcatcatcgaccgccagcccattggcgctattctggtgttctccaacttgacggacaaggaacgcagcatgttccaatcacacggcattccgttcgtcgtcttcgatccttccggcaatccggcattagatgatctctccgtacaggcggacaactggatgggcggcgtcatcgccacccgtcatctgctggaactcggccacaagcgcatcggcatcatcaccggaccggatgaaatgctctgctcacgtgcccggcttgacggctattcggcggccctcgccgaacgcaatatccccacctctcccgaactcatcaccgaaggcgatttcaccacgccaggcggttacgaaggagccatggcgttacttgaagacgaacaaagtcgcccgaccgccatctttgcaggcaatgacctacaggccatgggcgtttacgaggcggcccgtcaactgaaaatccgtatccccgaagatctgtccgttatcggattcgacgatatacagaccgccgcgtacatgggcccggcgttgaccacggtccgccagccattgcaagacatggccgccactgcagcccgcatggtcatcgataccaatgaaggacgcaagattcagaagcgcgtggttctttctacgtctttggtggtgcgggacagcacgcggcggctcaaatcacgggattagtccaaccgtcagaacgacaccggttccttgcatgcctcgagaatcgctcgggcatcgtcacggtgaatctgcacgaatgagccgccggcctcaccggcatgatcggcgtacttgtcgagagaggcgggatcgtcgggcacgccggcctcagaaagagtcagcggcgcacctacgcggcgcaggaaatcgacatagcgatcaatgccttcctcggccaccatgcgatcggttttgccggtgggcgtcacaccccacacgtcgaccgcccagcgggcaaagcgagccgtcacctcatcgttgaccagatacacgtatgccatccaatgcgggtggaccacggccagaccagcgccgtgagcgatatcggtgtatgcggacagcgcgtgttcgatgccgtgcgtcacccaatcctcttccttgccgcgcgagataatgcggttcagagccaacgtggaatcccacattgcattggagcgagcctcataatctttcggatcggccaagcacgctcgccacgaacgcagaatatgacgttggatgccctcggcgatttcgtcggaaaggttgtcatccaccggataggagaaatactgctcacacgtgtggcagaacatgtcctcgaagccatacaccgtctgttcggcgggcaatgtcatcaggtagcttggatccagcacggagaacctgggcatcagcgggaacgacgtatagccgagcttgcggttgcgttcccaattggtgagcacggccgcatctcccatttccgagcccgttgccgcggtggtgagcaccacgccaaccggaatcagcccttcaggtgccggtttgccggtttcgatgtagtcatcccacaaatcctcatcgtcaccgatgccggaacccaacgaaatgaatttcgcgcagtcgattaccgagccaccgccgacggccagaatcaggccgacgccatgctccttgaccagtcgtacgccttccagcgctttgtccaatcgcgggttcggcgtaacgccgggcagctcgatgattttgcgcccggttcctgccagcgcagccatcacatcgtcataggcaccgttgcgtttaatcgatccgccgccatacaccaccagaacggcgccctcgacacgctccacctcctgtgcgatatggcacgcctgccctttgccgaagtagatcttcaccgggttatggaaaatgaaatctcgcatgcgtaactcctttgttgtgctgatgtttccctgagaacagcttatcttcttctgccgccgatatgttcaccgtcgacgcgccccagcccgccacaaccagaaaaccgcccttggcgacgttgcctcaggcggttttccgatggaaggagagaaaggagaaagaaggaatggaaaggtgccgtgcggacgtaacataacgccgcgcatggcaaaactaccggatcaacccatcgggcgcactggcatcataattgatgtgtacacgcccgatggagcgaattcagtcggtcagaccgatggtcactcgacctcagccagagcatcaacaatgtagttgttgatggtggccttgacggactcgaggtggtcggacttggtggcggcgatgagctcggactgcggcttgtcgaggctgtaggcttcgaggtcggccaaggtgacgttgccctcgtcgatgtccttgccgatgccagagtcgtaggagctgtagcgctcggccataaggtcctggatgaagccgtcctggttcatcttgtcggcaaccagcaggccggcggcgtaggcatccatgccggcgatgtgggagcggaacaggtcctcctcgtagaaggaggtacggcgcggcttggcgtcgaagttcagaccaccgtgaggtccgatggagccggcctgcaggacttcccacatgacggcgacggtctcgtacagatcggtcgggaactcgtccatatcccagccgatgagcttgtcgccctggttggcgtcgagggaaccgaggaagccggactcgcgggccacgcggatctcgtgctggtaggtgtggccggccaggttggcgtggttgccttccaagttcagcttgaagacgtcggtcaggtcgtggttgcgcaggaactcgatggcggtggcggcatcgaagtcgtactggtgcagcgtcggctccttcggcttcggttcgatcaggaactgggcctcaaagccgatttccttggcgtaatctgcgcacatgtggaagaacttggcgatgtggtcggtctcgcgcttcatctcggtgttccacaggttctcgtagccttcgcggccaccccagaacacgtagttctcggcgcccaggcgcttgccgatctccaggctcttcttgagctggccgccggcgtaggcgtagatgtcggcgaacggggaggtggcggcgccggacacgaagcgcgggttggtgaacagggaggaggtgttccacagcagcttgacgccggtggacttcatgttctcctcgatcttgtcaacgaccttgtcgaggttggcgttggtctcgcgcagggtgtcgccttcgggggcgatgtcacgatcgtggaagcagaagtactcgacgcccagcttctggaacagctcgaaggcgtagtcgaccttggccagagcctggtccatcggatcggtgtacttgtagtacgggcggtgcgcggtgccggtgccgaacggatcaaccagttcctggttgaaggtgtgccaccaagcaacgccgaagcgcagccaatccttcatcttcttgccggcaacgaccttgtcggcatcgtagtaatggaaggcgaagtcttccttcggtcctttggcgcggccgacgtactcgatcttgtcaacatcccacagacccatttgggcgctcctttgcagtaggcgatattacggattgcaggaccaataataaaacgaacgaactaagtttgtcaaatgattgaattaatacgccgcgtctcagcgtgttgctagtcattgcaatggttttcgaatgcagtcaaggcacagatagtatgggcaagccaagaaagacaactcagccaagaaaacgagacttgataattgacgtcacgcaattcctcgccggccaccgctgaggccggctccaccaccccgccaactccaacagcaccacccccgccaacaccaccgccatggtcatcaccctgatgatcggctcgtttgtggccatcctcaaccaaacgctgatgatctccgccctgcccacgttgatgcacgagttcgacgtgcccagcagcaccgtgcaatggctgaccaccggattcatgcttaccaacggcatcatgatcccgatcaccgcgttcctcatcgagaccttcaccacccgccagctgttcctgtacgcaatgggcatatttgcagaatgatcttggcgttaatgcactggtgtccggtctggtgatgatgccgagcggcatcgccatgggcatcctgaacccggtggcaggcaagatgtatgaccgtatcggtggccggccgctcgccttactgggcttcgcgatcatgacgtctgcggctgtgctgctggtcaccatcatgaacacgcacaccgcggcggccatgcgcaccggagtgccggaagcggcggcatcggccattggcgtgcgggcttcgttccgcacggtcgccattgtgtgcgcggtctgtttggttgcgtcactcttcattcgtgatcgcggccgccgacttggacagcagcgttaggcgaatccttcaccgattgctggccttcttgatcagcgcgcccaaagtaccggcttggcgcgcggcttccacatcttcccagtcgagaccggtgtctttggccctcccgtagaaaaaccgcaccagaccggcaaagtccggtttatatccggtttcccggaatgaacgggccagcgaatcaccgatttgcgggtcatcaggccttcgtgcctcatagatcgggatggaacaggatcgccacacgcctctcacatgtgcgatgcgattgacgatcatgccgccgtgcgcaccatcgtattgcgaggcggcatgtacgtccgccacctcgtagacaccaccatgaatgatgtcctcaactgtcagacgacctttgaccgcgctggcatcgcgaatccagaacatcgaagcgaaattggtgtcatcaagttcgcgaaaatcacgtatctcgcgtgtgccgatacgttcgtccttgtcatacatgaattcggccaaggctaggaatggcgagatacctgcgcccggaccgtactgcaattcgatacgtaaatcttcggattcattgccggtcagtccaataccgctgacggcgcagtcataggcaaaccaatcccagaaccaccattcgatcctttgcagcacctgcttcggatactttttgcatgggttcagattcacttcgcgataatatatgcgtctcgcttcggcatagacggcgagattgcagcgtttgaacatctcggctacgtctttggtgtccagcattgctggcaaaccggcattttcggcagtagtagtggttgcggtgctcatggtgtttccccttcatgtgatgtggacggcgggctacgttgcccgccgtgaggcacactgtatgacgttcgtgcggtggcccgcaagcccacatggcgagatggtggataagtggaaaacccaatgattccaaggggtatggaatgtgcataacagtggctaccgtcggtggataaccgcactttcttgcaggttatccactgatcgcgcagctgttatccaccgtctctgggttatccacatcgtctctggcgtgtcgtccactgtcagcagtcgatttctgcttcgtttggcgtgtataagtgcacggtgaagtgtataactccgcgcattagacatatttgctactgagaaaggtcccgaaatcgccttcgaacgcatagctacactcagcagatgtattcagcatggcaatagacccatttaggcaccggcgaatgattttccctcgcttatagagtcggcaaaggcccaacacctgtcccaacgccgacgctactgcactggcagcgtcggcagaggaccacaacttggcacagcaacgacgctaaaaccgcccagcatcgttacacgtccaagttttggccgctaacgacgcttaatgaacgcttagcgtcggcagcaggtcacgcactggttctccaccgacggtaacgctccttagcgaagccagcccgccactctttggcacatcaccgacgctgagagaacctccagcgaagccaaccagccaaccgctggcaacatgacaccacccacacccctcagcgaagccaaccggccagcgcatggcaccccaacaccgctgagaacacccaccccaccagtgcacataaaaaaaaactggtcatagcggttgcgatgtaattgcatcgtaatcgcgatgaccagcctcgggggggctgcaacgagcaccgaatgaatcagatgatgatgccgttgcagtgatcgacttcgtgttggatgatctgcgcggtccagccggtgaaggtggcgtggcgggcgcggaaccgacggtcctcgtagttgacctcgatacggcggcagcgcagtgtgcggcgttcaccggtcagcgacaaacagccttcctgggtgtcgaaggcaccatccgaagcggtgatcacggggttgagcatcaccgtgatacggccaccgagatcttcgtccacgaagacgatgatgcgtttgcctacgccaatcatgttggcggccatgcccacgcaccgtgaacggttggcctccagcgtgtctacgaggtcttcgatcacctgctcgtcgccgggtccagccgcttcagacggcgtgcgcaaaaacgaccgcgaagtcataatagggcgttgcatgttggaatcacgcttcttcgtgccagtggatgttggtgataagcggcagggagatgccggtaccgagcgacatgaccagtcgggcggcgagcagcatcgggaagttgaccgcgagcgcgcccagtaatgtgccggcggtgaaaatcacgatggccatgatgaacagtgttttggtggcgaatttgcgcaccatgaacggcgagctcggaatcgacaccgacagcaagagcagataaccggtgacaagccactgcaccaccgaggcgccgatggagaactcctccatcggcgtggagtaggcgatgttcagtgacgtttccgataggatgccgaggaaggtcaggatcgcgagcgagacgaccgcgatgacgagtttgttggagaccggttgcttgccgccgttaggcagctgtgttgcggaatgagtcacgatcttgttctctcctccattcattcagatattctgactacgacgttggaagtcttcctgcatgagtcgcagagcctcggtcaaggtgcgtaccgtggtttcgcactggtccgaggtcaatccgcccagcagttggctcaaatgcgcgtgatattcctccatatagatgcggcggatatccaagccgcgttcggtgagcgtgagcgtcaccgcacgccgatcggcggcatcggcgtgtttgacgacgagtccgaggtcggccatttcgccgacgagcttggtgatgctcggcgtagtgacgccgaggaatgcgctgacgtcgcccacgcgcgcggtgccggtatcttgcccattcggttcgttgatatgccagacgacgtcgatcacgtggacatagcgcggtttcatacctttcggcaatgccggcatcagttcggtgatggtcttggccttccagcagacatccaggaggctccgcacctcattcaccggaagcaagccggtcttggtatcggttcgggaatcgcacatcgctggcccaacctccaattagttaccaatagtcattaccataagtaactacatgcaggctctagacaaacccaacgacctgcgcgcccgtgtcgagttccgtttcggcataaaaaaaaagccaggggatccctggcttgcaatgcacatatcgctgcaggtttgccgggacctatatgttcccggcaacaacagccgtatatacgttaccgatcagtgctgccctcatcatccttggcacccgccgtggcggcctcagtctccttggcgttccacccggtgacggcattccaaccactccatccgatgaccactagcaagcacagcgagaagacaatagtggcccaattgaacagcgagccatcgttattggcctcgaccagtgactgccagagccagataacgcaggccaagcaggtcaatgcatacatacgggaggtggagcgcgcggtgagtttcatggcggaaaaagtcctttgattacaagaatgacggcagataacagtgtgggatccgcaccagcggcaccggcacgaatcccacatcgaggaggagaaaggggaaggtcagctcttcttgcgcttggatatgatgtccacggcgacggccagcaggagcacgaggcccttgatggtcttcaccacggcggtgtcaacacccataatcgacagaccctggttgataacacccatcacgaatgcaccaatcacagcgcccgggatggtaccaataccaccggtgacggccgtgccaccgatgaagcaggcagcgatggcgtccatctcgaactccataccggcctgagcagttgcggaagccagacgggaaagcatgcagacagcggccactgcggacaggaagcccatgtggacgaacagcaggaagtccacgcggcgggtgttgataccggagaggatggcggccttgcggttgccaccaacggcgtacacgtggcgaccgaacacggtcttggtcaggatgaagttgtagatgaagaccagcacaccgacgatcaccagcatgatcggggtaccaccctgatcagcgttaccggaggaagccagcaggtaggtgacgaaggcgatgacgaccgcgacaagcacaatcttgaggacggtcaggctcatcggctcgggcaccaggccgaccttggccacacgggcgcgcttgcgcagctggctccaggcaaagccgacaatgcacaggatgccgagcacaatggtcagaccgtcgaacggaccccaccagccaaggatgttgggcaggtagttacgggcaatgccacggaattcgagggaggtaatcggcacggattcgccgacgatcacggtggcgagaccacggaagatcaacatgccggccagagtggtaatgaagcccgggatgccgatgacggcgacccagaaaccctgccagacgccgacgatcaggccgacgaccagagcgatgacgatggcgagcatccagttgactccggcgcgttccatcagcagtgcacacacaccaccgatgaaggctaccaaggaaccaaccgaaaggtcgatgtgggtggcgatgatgaccatcaccataccaatggccaggatgatcacgtaggcgttctgctggatcagggacacgaaggagttcggcttcagcagcacacctccggtcaggatctcgaaggccacgacgatgatcagcagtgcgccgacaataccgtattgacgggcattgttggcgaccgtggccagcaggccggtcttttcttctttctttgcaggtgttgcagttgcggcgctcatcaggctgccacctccctttccttggtcatacccttcatcaggtattcctgggtaaatccattcttctcgacattgtcggtgacgacaccgtaggacaccgtgtaaatgcggtcgcagataccgatgagctcaggcagctcggaggaaatcacgatgacggccttgcctgcatcggcaagcttatcgatgatttcgtagatctcatacttggcgccgacgtcgatgcctcgggtcggctcatcgaggatgaggatgtccggctgcgagataacccacttggcgagcagcactttctgctggttaccaccggagagggtggagacattcacatcgatgtcatgacacttgatgttgaagtccttgcggtactgttcgacttccttgcgctcaaggttgtcgtccacaaccccgcccttgctgatcttggtcagggaggccagggatgcgttctctcggatgttctgcagcaggttcagaccgttgcccttacgatcctcggtggcgtaggcgagacctgcgtcaatcgcggactgcacgttgggcatcttgacttccttgcccttgacgaacaccttgccggagatgttggaaccgtaagagtggccgaagatggacatggccatttcggtacgacccgcacccatcagacccgccagaccgacgatctcgccggcgtgcacgttgatgttcgcatggtctacgatcacgcgctccgcgtcgagcggatgatgcacggtccaatcctcgacgcgcaggtattcctcgcccggggtattggaggggtggttcgggtacaggttgtgcagcggacgacccaccatcttgcggatgagttcttcctggtcgagcggcgtctccggcgtcacgtacatcacaccgacggtcgaaccgtctcgaatgatggtgacattgtcggcaatggcggcgacctcgttgagtttatgagtgatgatgatgctggtcacgccctgctcgtcacgtagctgacgaaccaggtcaagcaggtgggcggaatcctcatcgttcagtgcagcggtcggctcatcgaggatgagcagcttcacgtccttggacaatgccttggcgatttcgacgagctgctgcttgccgacgccgatgtccataaccctggtatccgggtcttcgggaagtcccacacgatcgagcagcttcttcgcctcggcgcgggtcttgtcccagtcgatcacgccacccttggcctgctcgttgccgatgaagatgttctccgcaatggacaggaacgggctcaacgccagttcctgatgaatgattacgatgccgtcggcctcggaatcattaatagtatggtatttgcattccttgccatcaaaggtgattttgccggaatagctaccgtatgggtacacacccgaaagcacgttcatcagggtcgatttgcctgcaccgttctcgccgcagatggcgtggatctcgccgcgatcgacggaaagattcacatcggtgagggctttgaccggaccgaacgtcttcgtgatgttttccatcgtcaagatggtgtcatttgatgacatgtcatcactcctcgtcacagttctgtgttcatggacatgcggcgcatatcggccatgcgccgcatgtcattgtgtttgtttacggattgcctgatgaggactacttagtcagctcgtcgaagcgatcctgggtgatgtagttggccgtgaccagatcctggaggttgtccttggtgatgttctgggggtcaagcagcttggacggaacgtcgatgttgttgttgttgaacttgccgttcagaccggagacttccttgccctcggcgatctcgacgaccatgtcgtacacggcgtcagccagcttgttcacgtccttgaacacggtctcgccctgcttatccttggcgatgttggcaactgcgatctccatggcgtcctgaccggtgatgtacggccaggagttggtgcccggcttcatgtcgggacgcttggattcgatggcgttgatcacaccctgggcgatgccgtcgtacggagtgaggaccgcgtcgagcttctcgccgtgggcgtaggtggagtcaaggatggattccatgtccttctgcgcctgctcggtcttccagctcatcacggatatcttctgccaatcctcaacggtgaagtccttggtcacgccaccctgaccgtgctgggacggggagacgagcacgcccttctcgaagtacggctgcagcagatcccaagcgcccttgaagaagtacttggcgttgttgtcatccggggaaccggtgaacagctcgatattgaacgggccggtggcgccatccttaagcttgagctggtcaatgagccacgtggcctcgagcacgccgacctgctccagctggaaggtggcgtagtagtcgacggcgtcggtgttcatgatcagtcgatcgtaggcgatgaccttggcacctgcatcgcgggccttctcaacggcggggcccactgcggtgccgtccttggaagcgaccacgacgatcttggcgtcgttgttgaccatgttctcgatgtcagcgttctgctgggccggcttatcgtcggcgaaggacaggatgaccttgtatccggccttctccagcttggccttcaggttgttgccgtccttgttccaacgctcttcggacttggtcggcatcgaaatgccgatagtggcgcccttttcgatcttggcatcaccgccagttgcctggccgctacggctgccaccgcaggccgcgaggcccgcgcacatggcaacgcctgccaccacggcgacgatcttcttagtgaacttcatttgttctccttcatcttcgaggggatggcgaaccctccttggtcgcccgaacctgagaataacctcaggttcatctcatagaataccgtattgagttaagttgtcaaactcaagaaagcgaatttcctgtcgtttatgttcgaccaatgaacgcaatgtcgatttttcgcgcatcacaaggcgacacgccgaaaaatccacgctctgcgcctcgctgtgcctcatgctggtaacgactacactgaactcttatggcaacaaggcttttcggttcgcagacctcgcttcgcgaggcaaaccgcgccaacttgctggccagcatccacaagttcggcgccatgacacaggtcgaactggcagaggtgacaggactgtccactgcgaccgtgtccacgctcgtccatcagcttgtcgacgaagaccagctggagaccaaaaacaccgttcgcaacggtcgcagagccactctggtgacccttgcacggcatcagggcctcggcgtcgggctttggatcgcgcgacgtcatcttacgctttctatcgttgacttctcgaagtcaatcatcgctgagcacacgctccccctgccgttgggccacaaggcggacacaacgctggaacgcgccatgctgctcatcaatgagaccctgagcagcatcgacgccgaagccagcgagctggtcggcatcggcgtggccgtggccgcaccggtggccaccagcgaccacaccatagcgattcccggcattctgcccggatgggacggcgtcgatatcacggccccgttgcgcacggcgttcaacgttcccgtatacgtcgataatgacgcgaatttcgcggcatacggcgaatcccgtatgggcgtggcggcaggcaaacgcaatttcgtatatatctcagccaacgacggggttggcgcaggcatcgtcatcaacggcgaaatcatgcatggcgtgaccggcctggccggtgaaatcggccatatccaggtcgacccgctgggtgccatctgttcgtgcggtaaccgcggctgccttgacaccgtcgtggcggaaaacaggctggtgcagttgctcagcgtcacacacggcaatatgacgctggatgatctggtgtcctttgccaacgaaggcgaccccggttgccgtcgcatcatcgccgacacggccgtgcgtatcggtcaggtggcggctgatctgtgcatcagcgtggatccggaggtcattgtgctcggcggcaagctggccatgaccggcgacgtattcatccaaccgttcaatgaagcgttgcagcgcatgctgttccctgatgccgtggcacccatcgatgtactcgtgtcatcccacccgaacgacaactgcgcgctaggcggcgcattatgcgccatcgagttctcggttcgcaatgacgtcagccagtgaccggtaccaggagaagagtgagaagaaggaacacaccatgaggaattcgagcacacctcctctgctgcggctggaggacatctgtgtgaagttcggcttcgtcgaggcgttgaaatcggtgaatctgtccatccaacgccaggaggtcgtcgccatcgtgggcgataacggcgcaggaaagtccactctgatcaaggtcatcgcgggatttctgcagccgggattcggccatatctatctcaacggcgaacaggtgaccattccctcgatcagggaggcggaccgcatgggcatcgcatcggtgttccaggggcaggagttctgcgacaacctggacgtggcctcgaacctgttcctcggcaaggagatcaatcagattggcatacgcgatgacgattcgatgaactcgcgtgcccgttccgtgctgaagaccctgagctcggcgattcgggtcggctcccctatcgcatccttatccgtcggccagcgccagaccgtggccatagcacgcacgctgctcaatgacccgcagcttattctgctggacgaaccgaccaccgcactgtcggtgatgcagtcggcggaagtgctcgcatatatcaagagactgcgctccgaaggccggtccgtggtgatggtctgccacgatctgccggatgtgttcgcggtatccgaccgcattgtcgtgatacgtcaggggcacgtcaccggcgtgcatcgaaccgtcgaaacgtcctatgaggagattatcgccgaaatcgccggcgtgaccaccgaacacgagtacgaggaaatcgctgagaacccggaattcgattccatggtcaggcagcggaaactcatcgaccgcactatcagcgcggcagtgagccatggcaccggccatgactcaccattagactaacgtcccgttgccggagcgacatcgtcagcgcagagccaggttggccgcgccgatcagaccggcatcctggcccgcagtggccgcgacgatcttggcatggccgcggtaggcgctgccttccaggaaacgctggtagttgtagcgggccggctccagcaggatgtcgcccacggccaccacgccgccgccgatcacgaacaggtccgggtcaagcacggcggaaacggcggccatggtgcggcccagccattcgccgatcttgccgaacgcatacaggccaagtacgtcaccttcctgagccgcttgggacaccatcggcccctccagtttggtgatgtcgccgccgcacagttccagaagacgcttggcgtcctgaggacgacggcgcacggcggacttggcgaagttctccagcgaggttcccgaagtgtaacgttcggcgcagccgcgcaggccgcagccgcagtggtcgccgtccgggaccatcggcaggtggccgagctcggcggccatgccgaaggagccgcggtagagctggccgttgatcacgatggcaccgccgaggccggtgcccacggtcagcgcgaccatgttggagctaccctggccggcgccgtgcacgaattcgccccatccggcgcagttggcgtcgttttcgacgatgaccggcacggcatggtcgatcagcgcgccgacgtgctcggacagatcgtagttgatccatgccggaatgttggcggagaaggtgagcgtcttgcgatccgcgctcacattgccggcggcggagatgccgacggcctcgatatcggtgtgcccggcggccacagcctcgcggtacacctcggcgatgtgctggttgatggcgtcggcgtccatcggcgtggggacgcgccagcgctggatgatgctgtcattttcatcgcagacggcggcggcgatcttggttcctccgatatcaatggcgagcgtggtcatggcttactccttgaagactttcgtaacatgcgagatagcgaaaatagtagcgagccgccatgacctcccaccgcggtttttccgtggtgcgccatgcgtcgcgaacattccgccgatgcgcttcctcatgcatttcacccgttgcaaacgggcgccccttaacgccggcatcggtgcggacggcgtgtcgaatcggatgcaatcactttcaccgtccttgcggatggcatcgaagaacggcaggaaacaaaaaaaactcccgacatgcatcgggagtttggtggcgaccccggccggacttgaaccggtgacctccgccgtgacagggcggcgctctaaccaactgagctacggggccgtgcgtgcctcgctgaggcacaagaggatatgttacagcatcatcggattacgacacgccgtctgatacatcgttccttccaccggcgaaccgaccgcaggtgtggtggacggtatgcggaccatatcgttcgaccgcgcacgaccgcactccccataagacagtagccgtcatgcgtcaacgcacgttgtgcgacaacgcggcacgacgcacggccaccgaggccagcaaaccgatgaacagcatgatgccggcgaccagaagcgtccactggccgccttcgacgaaccctgaagtcatcgcatcggcaatcttcggcgcctcgtcgccgaatcgggccgccggtccatcaccgttgcggaacacgccgatcactccacccgccgaaccgctgaccgcttgggccagaccgtcgccgaccttggcgggcagcccgagggattcgagccgcgccggcaatgttccgttgacggccatggccaacgacgcgccggagatggccgaaccgacggcggtgccgagctgccgaaccgtggactgggtggccgacccttcgccggactgcatgatcggcacttcggagagcaccacgctggtcagctgcgcggaggcgaagcccagacccagaccgtacgcggccatgggaacaagctgccaccacaccgacaatcccacaggcataaggaccgcgaccaaagcgacggcgatgatctcgatcacaagaccgagttgaatcacgccggccggggtgagcttggcggccatgacatgggcctgcgcacctgcgacgatggaccccaggcccatcacggccagcatcgcaccggcctgcagcgtgttgagcccgcgggcgttgatgaggtacagcggcagcatgaacaccagcgcgaattcgccggcggcgatggccgcagccgcca

SEQ ID NO: 2980 - DNA, 22766 bp, Unknown
  R19_24m  MAG No. k141_10479
cgttcccatgggacatgttgcaaaatgagcacttgtggtgtggccatgacttctattgtggcacgagcgttccccgtttgcgtaacgagcagggcaaatccatgaatctcgcagtttccgcagcggtcaaagacgtgttctcgcgagactgttgtcccgcttctcatccgtctgtcacctcgttcgggccccgcctgtgaagcgttcatcaaactcttcgagtaacgattcagcatgtctggttcggaccctacgcttgagcgttatgggaaacagccaagaaccgcaggatttcaacatttccgtcatgccttcaagcctgacgccggtgcatgttgccaaggccgcagaaggcctgaatctgtatgacaccgcctcgcaccaggtcagccatttcgtgccgctcaagccgggcgaagtcggcatttatgtgtgtggcgccaccgtgcagtcgtcaccgcatatcggccatatccgtgccgccgtggcgttcgacatcgtgcgccgctggtttttgaagctcggctacaaagtcacttttgtgcgtaatgtgaccgatatcgacgacaagatcctcgataaggccgcggccgccggccagcgttggtgggcccgcgcctattattacgagcgcgaattcaccgaggcgtacaacacgctcggcgtgctgccgcccaccgtggaacctcgcgccaccggccacatgtcggacatgatcgacctgattcagcgcattctcgacaacggccacggctatgtggtcacggatgcggacggcaagcccaccggcaacgtgtacttcgatgtggcatcctggccgcattacggcgaactcacccaccagaagcagacttccgaagtcgatgaggccgctgccgtggccgaccgcatgggcccgtccgtggacgccaccggtgccgacaagtacaatccggtcgacccggccgacgcctcccccgacaagcacgacccgcgtgatttcgccctgtggaaggcccccaaggacaccgatcccgaggacgcccgttggtcgacgccgttcggcgtgggtcgccctggctggcacatcgaatgctccgccatgtcccaccgttacctgggcgatggcttcgacattcacggcggcggtttggatctgcgcttcccccaccacgaaaacgagatggcgcagacctgcgcggccggctacccctctgctgcgcgctggatgcattcggcatgggtgaccgccaagggcgagaagatgtcgaagtcgctgggcaccggcctgtccgtgccgagcgtgctggccgagcattccgcttgggtggtgcgttacgctttgggctccgtgcagtaccggtcgatgctcgaatggtccgatcaggcgctggtcgaggcgcaggccgcatacgaccgtatctcgaacttcatcgagcgcgccggtgtggcactaggcggtcagccttctcgcgaggaggttgctgccgtctccgccgacgacctgcccgccgatttcgtggccgccatgaatgacgacgtcaatgtgtctggtgcaaccgccgcgatcttcaccgccatccgttccggcaatacgttgctttcacagctggctgaccgcgccgattccgaaaccgccaaggccgaggtgcgtgaggcgctgctcgccgtgcgtgccatgctcgacaccttgggtctcgacccgctggccgagccgtgggtgtctgctggcggtgccgctgatggcacggccgagtcgcccgaacatgcggcgctggaggcactgattgccgagcagctcaacgcccgcgccgaggcccgcaaggccaaggacttcgccaaggccgaccagattcgcgacgccctgaccgaggccggcatcgccatcgaagacggcccgcagggttccacttggagcctgaagtagccgcttcaaacccatcaatcagtcaaacacgaagtccacgtccacgatgtgcaggcgcttgatgagctccttctccagcgagcgcttgcattcgatgaggtcggctacatcaatggtttcgccgatgccgctcagatacacgtcaacggtgtagttcatgccggtcttgaagatcagcgtctgctcgtagtcggtgttggcaggcagatggcgctgtgcctcggcctccacgtaggcgttggtctcatcgtcgtcatgcacgccgccgaccaattccacgaacgcctctttgagcacgctgaacggttccttgatggtcaatgccaccaaagccacggtgatgaagaaatcgccggtgtagtgcaggaagtcaagcggaccgccggccggtagcagcatcaggaagatggcaaccacgccgatgccgaacgacattgatccgtcgaccaacgtgctcttgcactcggcggtgagcatggtgctggaatcgccgatggagcggttggagcgccggtaatacatgtataggctgaagcacactattacggtcaggatctcgtagatgaccaccgggccggtttcaatgcgttcgccggacccgaacacgaagtagtcgtacgctactcggcacacgtcaatcagcgaatacaccaacaacgacatggtgaaaatggccttgcagatcgcgtagatgggttccagtgcgaacatgccattggggaagcgctcggtggttcgcaccgtgcgcgacgagaggtacaccgccaccattccggacaggacggaaatcgcggtgaaggagaagtcgaggaacatggccttgaggccggtcatgaagaacacggccacgccggctaagacctgcagcacgttgatgacgatgccaacgatcagggctttgcgttcgagtagtttttgggtgggcatcagtgggccttccttattgcacggcatgtctgcgttggcccgaacgtcatggttcggagcgcacggcagtctgcgtataagcggtgtccagcgattttcaaaacagcgtaagcattccaaaaaacacaggattctttacggtttccatggtatcggaagcactcgattggcttcgccacgagcggacggcacggcatttgccgtctgaatgcccaacatccctgactactccgcgacgcaatccccggaaagagtcgtccccaacaccgcaatttcccgcgtggcggctagactgttgcccattatggcagctttttcatctttgacagacagactctcgaatgcgttcaagcatctgaagagcaagggcaagctttccgaggcggatatcgacggtacgatccgtgaaatccgccgcgcgctgctcgacgccgacgtggcgctcgacgtggtgcgttccttcaccggcaaggtgcgtgagcgcgcactgggcaccgaggtgtccgacgcgctcaaccccgcccaacaggtggtgaagatcgtcaacgaggagctcaccgacgtgctcggccaaggggtcgatcgtccgctgaacttcgcgaagaacccgccgacgatcatcatgctcgccggccttcagggtgccggtaagaccacgctggccggcaagctcggctactggctcaaggattccggccacacgccgctgctggtggcggccgatttgcagcgtccgaacgcggtgacgcagctgcaggtggtcggcgaacgcgccggcgtgcccgtctatgctcccgaaaagggcgtccaatccgatggcggcgaggccgtcgcagctccgggccagatctccggcgacccggtgaaggtggcccgcgattccatcgaactcgccaagcagaagctctacgacacggtgatcatcgataccgccggtcgtctgggcgtggacgaggagctgatgaagcaggcccgcgacattcgcgatgccgtgcaccccaacgaaatcctgttcgtcatcgacgcgatgatcggccaggacgccgtcaagaccgccaaggcgttcgatgagggcgtggacttcaccggcgtggtgctgtccaagctcgatggcgacgcccgcggtggtgccgcgttgtccgtggcgtccgtgaccggcaagccgatcctgttcgcctccaacggtgagggcctgaaggatttcgaggtcttccacccggaccgcatggcctcgcgcatcctcgacatgggcgacatcatgacgctcatcgagcaggcgcagaagcagttcgatgaggaagaggcccgcaaggccgccgagaaaatctccgaaggctccttcggcctggacgacttcctcgatcagctgcagcaggtacgcaagctgggctcgatgaagtcgctgctcggcatgattccgggcatggcccagcaccgcaaggaactcgagcagttcgatgagaaggaaatcgaccgcaccgaggcgatcattcgctcgatgaccccggccgagcgccgcgatccgtcgattatcaatggttcccgccgcgcccgtatcgcctatggttccggcgtgacggtttctcaggtgaacgctttgctgcagcgtttcgagcaggccgcgaagatgatgaagcgcatgtccaatcgtggcggcatgggcggcggcatccccggcttcggcggcccggctatgggcggcggcaagaagaagggcaagaacaagaagaaaggcggcaaatccggcaatccgatgaagcgcgaggccgaggagaaggcattgcgcgacaagctggccggcaaatcctccggttcgaccggcggttccgccttcgccaagaagccgcagaacccgcccctgcccgccggccttgaacagatgatgggcaacgtcgatggtggcactgaactgccgccgaacctcggcggaggccttggcggactgttcggccgctgatctcacaacttggctcccctcgcagaggggagccaagttatatctcggttcaatttatatttcgaaaggaacttccatgacgacaatcttcagcgcggtggcaatcatcgcactgttatggacggccttaagcgcgctgcccgccggtctcgaggcccgtatgccgcttccgtacatgattgccctgactccgctgctgtgggttcctttgatgattctggccgcggtcgccgcatggcaacatgaatggactgcgatgtcgtcgcttattgtggtcgcgctgattgccagctcacagcgcatcaactactggggtacgtcaatcgacccagccggcaaacgcagagaatcccaccgtgaaacagcccgtgaaacaacttcgccgacgctgtcaaaaagccataacagcaatacatcgagcacctcaaacactccgaaggaaggacccgaaacagtccccgatgggcaccgtgaaacaacgcgtgaaacactctcgccccagttctcggttatgacgatgaattgtcgatacggacgcgccgacgccgctgaaatcattcgcaatattcgcgaacgcaatatcagcgtattggccttgcaggaagtcaccgacgacctcatcacacgtcttaccgaagccgacatcaacgaactcctcccctaccatcagttcggagacgccaaagagaccgataatggcggattcaacgtgatctattcccgctacgagccgagcgcagcggtgcccaacgtggtctccatccctgccgccgacgttcccgccatcaccctcaaaacctccggtactcgcacggtgacgctttgttcggctcacccgaaatcgccgatgcgcggctgcgcggattggtcggccggcattctgggtctgcgagaactcgcccgtgcaaaatccgtcagcaatcgcaacatcgtcgtcgttatgggcgatctcaactcgagcaccgaccacccgagcttccgcgcgttgctcaagtccggattcaaggacgcgagtctgattcaagccgccggaccgaacctcaccttcccgcgctggctcaagtggccgcgcatcgaactggaccatattctgttcacccaagggctcagaccgtccggcgtgacgtccttcgaagtgccggacaccgaccatctggctttggccgcaacgctcaccctgcggtagcgggcgcggcgatcgatcgggccttggccgtgtggcgcgaagcgggcgggaacgtctggaagacccccgcccgcagccgggtggttcgccgtcagaggtccatggagcggatcagattcaccatttcgatcgcgccctgcgcgcactcggaacccttgttccccgctttggtgccggcccgttcgatcgcctgttcgatggaatccgtcgtcagcacgccgaacagcaccggcacaccggtgtcgaggctggtctgcgcgattcccttcgagacctcgttgcacacgtaatcgtagtggctggtgctgccccgaatgaccgcgcccaggcagatgatcgcatcgtagcgcttgctcttggccatcttcgacgcgatcaggggtatctcaaaggcgcccggcacccaggccaccgctatgtcctgttcgcggacattctcccttttcagggtgtccagcgcccctgccagcagttttgaggtgatgaactcgttgaacctcgccacaacgatgcctatcgtgatgttttcggctaccagatcgccttcgaacgtgtgcatttattcctcctccatgttcaggatatgtcccatgcggtttttcttggttttgagatagaaactgtcgtaagcattggcttcgatttcgattggtattctgtcgcggatctccattccatagtcttccaattgatacactttgtcgggattgttggtcagcaggagcatggaccgtatccccaaatccctgagaatctgcgctccgatgtagtactccctcgcgtcaccggggaatcccaacgcgagattggcgtcgagcgtgtccatgccctcgtcctgcagacggtaggccttcagcttgttgaccagaccgatgccccgcccttcctgacgcatgtacagcagcacgcccgagccatgctccgcgatcgtccgcatcgccgcgtccaactgctgaccgcaatcgcaacgcaacgagccgaagacgtcaccggtcagacattccgaatgcacccggcacaacacatcggtcccatcgcccagattccccatgaccagcgcgacatgatgctcgccgttcaacctgttcacatagcagtgcgccgtgaattccccgtatcgcgtgggcatcgccacggtcgagacacattcgacgagcgtatcgtgcgctttcctgtattcctgcagttccttgatggtcaggagcgggatctgatgctcctgggcgaaccgggtcaggtcgggggtcctcatcatccggccatcgtcgtccatgatctcgcagcacaggccgcattcacgcaatcccgccaaccgcatgaggtcgacggtcgcctccgtgtgcccgttccgttccaggacgccgcccttcttcgccaccagggggaacatatgccccggtctgcggaaatcgaggggttccacgtcatcggagacgcacatgcgagccgtcaatccccgttcttcggcggagatgccggtcgtggtgccacggtaatcgatggacaccgtaaaagcggtttcatggttatcggtgttgtgctcgaccatgggcggaagcatcagcttgtgggccagttgctcgctcatgggcatgcagatcaatcccttggcgtgggttgccatgaaattgacgttccatgtggtggccgactgcgcggcacagatgagatccccctcgttctcccggtcctcgtcatcgatgaccagaacgagcttcccttcccgcagcgcctgcaacgccgcttgcaccgactgatggttcatgattcatgcatcctttctcagaacccgcaccgggacagcagatcctgcgtcagtcccgtccgggtcgtcatcatgttccgcacgtattttcccaatacgtcgttttcgagattgaccacgccgccgacccgtttctcgcccagcaccgtctgcgccaaggtgtgcgggatgatcgataccgagaagtccctttccgtgatctccgcgaccgtcaggctgatgccgtcgacggcgattgagcctttctcgacgatgccttcgagtatctcgtttcgcgccgcgatccggtaccacacggcattgccttcgcgccgcacggaggatatgctgcccgtgccgtcgatgtgcccggtgacgatatggccaccgaaccttccgttcaccggcagggcccgttccaggttgacgccgttcccgcggcgcaatacgccaagcgaggttctgcgccacgtctcattcatcacgtcgacggtgaagcgtcgccggtcgaaatcgacgaccgtcagacagatgccgttcaccgccatgctgtcgccgatatggaggtcctccatcacgttcgtggcatcgaccgacagcgtgcagttggcggcgctcctccgtatgtccgccaccgttccgacttcctccactattcccgtgaacatgaatacaccacctcgctttccaccagataatcctctcccacccgggagcaggcgcggggccggagcatgacggcgtcggaaggcagggcgactccttggccgcccaccgggcttttcgcggtgccgccgaatatcttcggcgcgatgtacacgtgcgcctcatcgacgatccgctgttcgagggcgctccaattcatcgcgctaccgccttccagcagcacgctgtccatctgcatatcccccaggcgccgcaccacgtccgccagatcgacgtggtcgcccttccttccgacggcgagtatttcgcagccgtgccgccggtagtcctccgccttgcgttcgtcatcgcaggcggtggcgatataggtcctgacgtcattcgccgtctgcacgatccgcgaggtgaggggcgtcctcaatcgcgtatcgcagacgacgcgaaccgggttccttccgtgtgccatgcggcatgtcagcaacgggtcgtcctcgatcaccgtgttcacccccaccatgaccgccgcgacggatcgacggagctgatggacccgacgcctcgactcctcgccgctgatccaccgtgattgattggtatgggtcgctatcttcccgtccatcgtcatggcgtatttcatgatgacatacggcgtatgcgtggtgatgtatttgctgaacacccgtatcagatgccggcactcgtcggccagcacccccacatcgacccgtatgccgtggtcttcgagcatgcgcacgcccttgccggacaccacgggattgcagtccaaggttccgacgacgacccttgcgatgccgctttccacgatcgcctccgtgcatggcggcgttttgccgtaatggcagcacggctcaagcgtgacgtacaacgtcgccccggcgggcgactgcgtgcaatgccgcaacgcgttcctctcggcgtgcaatccgccgaactcctcgtgatacccctgcccgatgatccgatcgtccttgacgatcaccgcgccgaccatgggattggggttcacgtatccggcccctcgcttcgccagctcgatcgcgagtcccatgtactgcgcatcgtccatgtacgcctccaagcatgttgcgcccatacgctatccaaggcatacaaaagaaggttcatgcgaacacgaaaacgccctgaaatgatatggcatcatttcagggcgtacgacgaagcatgaacgtactttcatcttctctcatccagactgtactgtcggctttggaatctcaccaaatcatgccttgcggctcgtgggctgtaccaccggtagggaatcgcaccctgccctgaagatagttattcgttttgcccgtgattgtactcgccgacgctccccctgtcaacggaagcggcctcacgcagcgcccgggccttctgcatcgtctcgtcgtactcgaagtcgaaatcggattccacggtgatgcctccgcccacgccgagcgacgtctcgcctccctcccgcacgatggtgcggatcacgacgttgaaatcgcaatcgcccgtatcggagaaatacccgatgctgcccgtgtacaatccccggggcgcgcgttcgagctcgtcgatgatctgcatggcgcgaaccttcggggcgccggtgatcgaaccggtggggaacgcggcgcgaaccgcgtccacggcgcaacgatccttgcgcagcgtcccctcgacggtcgcgacgagatggaatacggaaggatacgtctcgatggcaaagtcggggtccgtgccgacggaacccggttcgcagacgatcgacaggtcgttgcgttcgaggtccacgaccatcagcagttcgctgtggtccttctcgctgcgggcgagttcctctcggttcgcccgatcctcgtccggcgtgccgccgcgcggccgggtccccttgatgggccgcgtcaccacatgccccgagcgaatctccatgaaccgttccatgctcgaacagcacacgtcgagacccggtgcgcgcagataggcggaaaacggggccgggttgtgggtgcgcagataacggtagatggcataggggctcccggatgtctccaggcgcaggcgctgcgccatgttgacgacgtaggcgtcgccggcgcgcagatgatcgacgagacgggccagggcgtcgccgtacccggcccgcgtgaaatcggaggagcatggggcgagcgaacgtcggcgcgcggggtgaggggcgggcgggcatgaatccaccaggtcctgcgcccatgtcagggcgtgggcggccgtcatcgtccgccccaggcagcaacagaacaacgaccgcgaccggacgtcctcgatgagtagcaggtcgtagaagaccatgctcgcctccggtgtggccgcgacgggatcgtgcctagtcggcacgccgcacgattcgcggccgaaatcgtatcccagatacccgatcgcgcctcccgtgaggggcagacgcggatcgcgcgcgccatcgcagggtccaagccgcttcttcacgacatcgaggaaatcaccctccacggcaacgccgtcgacgaggcatccgccccgcccgtgttcgatcacaagataggggaagagtcccaggatcgagtagcgcccctgcgcccccggcatcgaggagtccaggaacgcgaagcgttcctcgccgcgcacgcactccacgatgtcggcaagcggtcggaacgtcctgagcttgaacacctgcgcgctcaccggaactccttcgtctgcgcccgggcccgcgtccgcgccaccatgcgggcataggcgtcgttcacgtcgcgcgacacgctccccggttcgaattccacgccgccgataccggccacgggcatggcacccatcagggagttggtgaggaacacctcgtcggcccgaagcagctcgtcgggcatgatcgggcgttcgacggcccccgtgaacccgatcacggcatggcgcatgaccccgggcagcagaccgcaggagacgggaggcgtcacgacgtctcccccgatgacggcgaagatattggagacggccccttcggcgacctcgccccgcgtattgaggaacaacggctcgtcgacggcgcggtcacgggcgcgacgcttctccatgatgttttcggcatacgccaacgtcttcatgcgcgcgaggggagaggattcgttcctgcgcacatcggcgaagtcgcagcggaagacgcgcttcgcccccggcgcggcatacgggttgcgtctcaacgagacgacgcggttgcgctcggtgaccgtgagcttgagggccgaatcgtccgatgcgccgagtccggcgcatgcgcggagaaccatcgtctccagatcggcgcgacgcgcctcgatgccgaggtatcgcaacgtctcacccaaacgcgtcagatggtcgtccagaaacacgggcgcgccgccggataccgcgatggtctcgaaggcccccatgccgaagaagaatccgtcatccgcatccacacgcgcccgggcaccggggccgatcacgcactcacccatcgatcagcgccccctttcccgtctcgcactgccatcaatcaggctatcagtcatgaagacggtaggtgcgccgccgacacgccgtccgtccggcgattccgtgcgtcacgaccggaccgatgcgcaatatccggcttccgcgttacactagtacggttattcgcgcgcgcgtggcgccctctacaccccgagccgcgaggacacgtggattccggccggtcatgccccacatggcaaaccgagaacccgcacacctagcattacaaggagagccattttggcaaccaagattcgtctgaagcgacagggcaagaagttctacgccttctaccgtgtggtggtcgtcgattcccgcaagaagcgtgacggcaaggtcatcgaggagatcggtacctacaaccccaacacccagccctcgaccatccagatcaagtctgaccgcgctcagtactggctcggcgtcggcgctcagccgtccgagcccgtcttcaagctgctgaacatcaccggcgactggcagaagtacaagggccttgaaggtgccgaaggcaccctgaagaccgttgaggctggcccggacgccgaggcccgcatcgcggccgttgagaaccaggctcagaagctgaaggccgccaaggccgaagctgccgccaaggccaaggctgaagccgaagccgctgccgccgctgaggaagccccggctgaagaggccgccgaagaagctccggccgaggcctgagcggaaacgaaaggctagctatgcttgcacaggctgtggaacacctcatcaagaacatcgttgattttcccgacgatgtttccgtcaagtcccatgagaacgcgcgcggcgaactgcttcgcgtacgcgtgaacccggaagacatcggccgtgtgatcggccgtggcggccgcaccgccaacgcgattcgcaccgtgattcaggcactgtctgaccacaaggtccgcgttgacatcatggacgtccgtcgataaccgataaggaacaattcacagcatggcacagcaagacatgcacgacgaccctcagcagctcgagttgctgagggtcgctcgtattggccgcgcacagggcctgaagggcgaagtcaccgtgcgcctgtacaccgatgatcccgagtggcgcttcgagccggactccgtgctctacagccaggatggcgagaccgagtacatcgtcgagggctcgcgcacgttcaaggatcgttggattctcaagcttgagggcgtcgacgaccgcaatgccgccgaggccctaaacggtgtcgaactctatggcgaggccgacgacgcagaagatatgctcgaagccgacgaatggtatcccaaggatcttattggccttgaggcccgtctagtcgagggcaacggtctgggactgcccgccggccaagtggtcggcaaagtggtggatgtggtcgactcccccgctcagtccctgctcaagattcgtttgaccgagccggtggtaaccggccagaattccaagggcgaggatgtggtcgagaagaccgcattggtcccgttcgtggaggccttggtccccgacatcgatctggaggagcaatacctcacgctcgatccgcccggcggtctgattccgggattgtaaacctcatatacgcgtgagaccaaaggactttctggctatttgttggcagaaagtccttttgcgtatgagcagaaacatcgagacgctaaaccttcctcattccggtatcgcatagcagataatcaatagtatactagtgaataaatgattttattcatggaaaactatatgttataacactcggagtatcgcaatgaagtatgtgcccaccaccaccaaacgcgatttacgcatcctaggcgaacagttctcgcaacagcgcaaactactgatgttgacggttgcggatgtagcacaccgctctggtgtcagcccgaccacagtgtcaaatctggagcaaggcaaggctgtccggtcagattcgctgttaaccatcgcgcgcgtgttgcaacttgctgacacactcgtagccgcatgcgacccctattccaccgatcttgggcgtctccgcgctggccaacaactcccgaagcgcgttcggaggtgaatccctgatggcaaaaactatcgaatcaactgtactgattacgctagggcctggaatggaagctcctgccggcacattgtatgcgactggcgacgacctatcgttccgctatgattcgacgtacacaatcagcagcgattccttcgacctcttcccatctatgccccgctcgctggccccattcttcttctctggacttggtccattttcggattccgccccagaccgttggggcagaaaggtgttttcccgcagtcttaaacggacgcgtgtcagcgagtcggaatatttgttcggcgtcaacgatctgacaagacagggtgccattcgattcattgttgatggcaagccagcggcaggagatgaaggagtacccgtactgtcaaagctgccggagttattggacactgcggatgcggtggaacagaaccgcgaggtaagtgatgtctccttacgcaggttgtatcgggcaaccggctcactcggaggcgcacgacctaaagcttcggtgtcggatcgtaatgcgctgtggctggccaaatttccgaaaccgaacggcgatgattgggatgttatcggctgggaagccgtcaccttggaaatcgcgaacatggccggcatcaaagtgcccgaacatcgcgtcattgcaataaaggattcggaggagagaagccggaccgtgctattgactcaccgttttgatcgcgtgtctgcaccatcagttgagcgaatggagcgattaccttatatatccgcaatgaccgcgctggaagcaagagatggggacggcggagactggttggatctagcagaatttacgcgtagggcaggaggagacaccatagagctatggcggagagcaatgtttggcgcggccatcggcaacactgatgaccatctacgaaaccacgggtatttgcgtaagaataattcctggcaattggcacccgcttttgacatgaatcctgaaccattcgatccgtcgctacccgactcacaccagatgtcattattaggtgacaccgaagtcgatatagataaattgatgtccgatgagagtctgtctttgttcggtgtaagccgtaaatatgcggatcattggttgccgacattgcgatcagccttatctcaggcattatctcgagcagcgatgcgccgcattgacatgcattccatcaatctgatggccgaacgttttgataaggcggttcatgctctgcagtagagcgatggggatctaccgcaaactgttactcgtctcgtggctccggcctcggtatgtctctggtatcgcttaaaaagtcgcggcggtcctcataccggagagcaacgattgcgatgactgcgtggccgacacgtcatacggcagctgattggcatcggactgctaaaggtcagttcaggcagatgacaaagttccgagaattctttccttacgttttctccatcggttacaggcacgttcgatacgtttatagccaattagctcggacggcaccaaatgaaaaatccttgcctacttccctattcgagcatccccaaaagggcacgccaccgctgcaatggcgtgccccgaatagagcgccgctgggctcagagcgcagagaagccctcttcggcaatcatgcgcatccagatattgagatgccagtcctgatcattggccaatgggtcggcctgatgcatggaccgcccatcgacgttggagggaaacacataggcacacgtggcggaaccatccgcgccatagttcgccatattggcctcgaaaatcgccttggccaaatcatcggtacgtgcggagcgcctttcttgcggcaaccgtgccagcacttcggcggtcaacgtggaccaataatgagggaacacatcaccgaattgtcggttgatgccgaaccaatacccatcccaatgtcgaatcgccacaccgtagagacgcgagtccggctgcgggccgctgaacgccaatagccaatccaatcgctccacggcaccatccaggtattcggcgcgcccggtaatgcgatgcgcttccaacagcagactcaccaacggcgcagtgatggactgttcgtaagacacctcatggtagggcaggtcgatacccaatcccaggaagtagtccgcactgaccaccacacgatcgagcagacgttgggtctcctcggttcgcccggtctgcttaagcacacgcgccaaggccgcactggattcggcgaactcgatgctcaggaagtgttcgccgccaatttcggccgcccgatcggcgatgttcaccgccatatcgagatcgtgcgcatccttggtggccagataatgttcggtgaagaaactgataatccacgggcagtcatagatacggcctccgaatttggattccggcagccccgagccgcgacgtaccgcgccgctggcgtcgatgagcgcggactcggcgaacgtgcgccacgcatcggcggcacgctgggccggctctcgtagggactcgtcaagcagcccaagattcagcgcacgttgtagcaataccggcatggcgatacgctcggaaccatccgaccagtcatcccaactgggatccagcacatgctgtccggtgcgggtatcggtagccacgatggccccagccaacgcgccgacgcgctcatacgccacctgatgctccaggatgtatcgcgcacggtcgttgacggtatccctcaacgtcttgtggaagagtacttcggtatgtgcacgatggtctccatccacaagctgcagttggtaggtacccgcctgttcggccgtcaaccgaactccgctcacagtccgttcgacggtaagaccgtcatccagcgccgtaacagcacgattcgtggcgatatcgatatgcccgcccacagtggcgcttaacgaggagaacgatgcaggagcaatcgtagcggccaggaatgcatcctcgtccgcataccatcccagttcccacgtcagcgcatacgaggcccccggctccagcgtgatggtcggctgcccgccgaacgcatcaggattcagcgcataatcggtgacctgcagcacgatgtgcccgcggatatccgaatacgtgacctggttacgcgattggatggcataggcattgattgcgccttccgtaacgatcagccccaagcgcgcaccgcggccgtccatcggctcggccagcacccagctccagtcgcctcccgcgaatatatgcgcatgcacacattccctcaacgctttgcgagcgcccggataccggtcgttcaatggggtctggatgcccaagcctgtgatggtcaccggctggttcgaaacgttgcgccattcataacgctcggtcagccgttcgccgctactgcgggtaacgtccaggacgagtcccgcaccgcacagtgcgaacgtctgctgttccagaccattggttatgccatatacctgcggcgtgttccactgcgagccaccactggtagtgaccacatagccgctgccccaatactggtccgatgtgtgccaagagacactgtcgtccagcagataatgacgattgggattatcttcgttcacaaaagcgatgggagcaccggtggattgatccagaagaacctggccattgccgaacggcagcgaacttccagcgaattgagagaaatccgttgaggcaccgacttctgcagtagcacgttcgatagcggcttgctgtgcagcattctgtacgtcactcatgactgatctcatttcgtcctcagcccttaacggagccggcaaccaacccggagacaatccacttctggcagaagcagaagaaaatgaacaccggaaccagggcaagcaccgtgatggtcatgaacagaggccagttcgtggagaactgctgcacggcgttgtatacctgcagcacgacggtctggttatccgtggagctgaggaacacactcggcaggaggaagtcgttccaagtgcccatggtttggaatacgacgacggtggtcaatattggggtgatcagcggcaacacgatgcgcgagtagatgcgccatgggccggcaccgtcgattttggccgcttcgaacaattcctgtggcagggacttcatgtagccgacgatcaggaagtagcagaacacacacgagcccatatacagcacaatcaagccaagcagcgaatccacaagtccggtctcggactccatgcggtacagcggcagcattgtggcctgcacaggaatggcgaaggtgaccatcagtacgccaccgacgatggcggtgaacttggatttcttgtataccacgccgaatgcggccatcgaaccgaccagaacctgcagcagcaccgccaccacggtgacaatcagcgtgttgacgaacgcacgaatgatggtgccgtcggcgaaggcctccttgtagttctccagcgtccactgctccggaagccccaatgggttcttgatcatatcgattgaggtcttgaaggagctgacgatcacatagtacagtggcacggcgcaaatcagggccaggccaagcaccacgatggtgcgaaagattttgcgaacgagttcacgctgagacggtgtcattggaacctcttttccacggcgttggcaatgccggtctgcgcggcgatgacgagaatgcaggcgatggtgaagcatacggacaacgccgagcccagtccgtactgactttggccgatacctttgaggatgatggcctgggacagcgtattggtggcgtatccggggccaccgccggtcaaggtgtacggcagatcgtagattttcagtccgccggtcatcaagaggaacatcgagacgacgatgccggggatgagctgcggcagagtgatatggaagaactgctgacgggaattggcaccgtcgacacgagcctgttcgtacaggtccgccgggatggtttgcagataggcgaggtacagggtggcgtgccagccgacctgcatccatacggccacgaaaatcacgcagaaccgggcccaattgtcatcggccagccaagggatattcggtataccgaataccgcgatgactttgttcatcacaccggaacccagtggagagaagatgtactgccaaattagaccaatgatggcctgcgccgggacaccaaggaagaagaacagcgaacgggcgaagctacgtccccacatggctttgttgagggtcacggccagcggaatggcgaaacaggtgaccaacagtgtggtgccgaaggcatacagcagggtgaagcccagggcggatagcagcgacgggtccttgaagatcgcagcgtagttgctgaaggccacgaagctgaagttttcggagtatccgtcgtaatcggtcagtgaatagaagaacgactgtgccaacggcacgacggtaaggatgaagaagatgatgatgattggcagaagaaaccagaatgaggagaggttttccgcccataaggatgatgcacgcttggattttggtttggaagcatgcccaatggttgcagcggtcatgggaagtccttgagaattatggtcgatttgacatagcaaggccgtgcctgccgccgaacgggcgatcggcacggccttgtcaggaggagagaaaggaactggtggtgtgatgggttacttcagcgtcgcccacttggcgtcgagagccttggcagcctccttggcggaaatctggccctgcacgatcttctgctgctgggcgatgtcctcggtggacatcaccgtaggggacttcggccagttgacccagtagaacttgttctgcttgaagtagttatccactacatccttcagttcggcaggaggttcggcattgtacttgctcgacagcgacagggtgccagcggcagaggtaaacgcctcgaggccctcttcgctgttgagataggcaaggaactttttggctgcggccttctccttgtcggaggccttggacgcgatggcgaagccttggtcggggccaccgttgatccactggccgtcttccttgctgtaggccgggaacggtgccacgccgaagtcgatgtctgacttctgcagatcaggcagatcccatggaccggagcgcatgacgccaagattgccgctcacgaattcctgcttgacctgatcggccgacagaccaacggatttctgaggaattacaccggccttggcggcagcttcccatctcttgaataccggagtccagtccttggtgaaagtggacttgccggaccagatgtccgcgtcaagatcgccggacttaccctgctcgccgtaatagctagccagcaagccggtgaacgagccagcgatctgagtattgaagtcctccaggaaagcggtgcttccgttggagttgatcttcttacccatctcgatgaattcatcccaggtcttggggaatttatcgcatccggccttcttgagaatgtctttgttgtagaagaacgcgcccacccatgcggaaaccggcatgccgtaggtcttgccatcctgctggaacaaggcgaagtttgtgtcgtcgatgccatcgaggaaatcctcgccggagatgtccaacgcggcaccggatttcatgacatcggtacggttatccatcgtcagattgaagatggtcggcggcttgccaccagcaagacgggtttgcagtgtcgagatgtactgtgccggatcctggccatactgcacgtcgagggtaatgtcggggttcttcttctcgaaccccttgacgacctcaccaatctggttgtccttgaagtaggaatagaacgaaatcttggttttcccgccacctgcggtaccggaaccgcatgcggccatcggcacgaccatggctgccgtagcggccaccgccacggctgactttagggcgaacttctttgtattacccctcatacctaagtcctttcaattagttatacgcttcaatattgatgcgcataaatgaatatatcattgaacctgacgcacgcaacaccggcgtgttgatgcgcataaactacgcgacgtcaagaaccgcacgaggccgagaatcggacatattccttagctgcggatggtgatatgcggagaaaccagcaatctttcaccagttttatgtccatcgatccgatcgaacagtagctccatggcggctttggagacggactgcggcactggatccacattatccaccggcacgcgcaactcttcgtcatgaccatccacatacaccgcgaccagggaaaaatcacgtccaggctgaatctgcatttccacacaaagctgcagcagcgaatctaacgcatgaggggtgcgcactgcaataccgccatggcattgagccattcgcttcaattcatccttcatcgcccagatgcctctccatcctttttcacgcgggatgaatatctcatattccatgcccagcacttgagccaccacacgagattcgctggcgaagaacttagcaaacgcataacggtcgagacttcttccccagtccccaacaaggaccatccgctgcgcccctcgttccgccaaacgattgacggccatctgcgccactcgacgataatccacatcaacgcacggcaggccatgtgcgttttctggcgtacccaccagcacaacgggaatatccaatcgcgctatctcaggcaggcgttcatcatgccactcgacgtcgaacaccaagacgccatcgaccacgccttgacgcaccatacggcacagtccctcaatcccctcgtcggccggaacgagcatcacactagacccccgctttctcgcctcctccatgattaccaccaggaacgggcgaagctcggccaaatcggtattctcatccatatgcaccagcacaccgatgacaccgaccttgccacccgccaacgatcgcgcattgatattgggaacataccccaactcatccatggccttgcgcacccgttttttggtggcttcggaaatgggcctgctaccgctcatcacatatgacaccgtggcctgagacaccccggcgcgctttgccacatcccttgcagtaaccatccatacacctcgtcgcttgccgcccgtcaccgtagatcaggcatggaacattcaccctccagcatattgaagtgtataaacatatgcacaccgaccgatgccatcccgcatatacacgacgacgaatcgtaccgctagttatccacagggttatccacacaccatgtggatcaccccggaagctagaaccgcattgtccgcactactaaccgacgcttcagcaaccgacacgaccgccaaagcataagcgtttacccacgagccgcggcggtgacgcgagccataaagcggtcgaggaattccgacacgtcgacgccgagcgcaacctgagtgtgcttgtcgaaatcttgcagccgcgagcggtcaccaatggtacggcctcggaacgggccctcgagatcgacttgcaagttgaacccgaaggtcgtgaccagcgatgggtcgagcgcggcggccacggccagcgggtcgtgcagtccacatccgcggatctccggctggttcttcaggtagaagtcgatgtagtagtcggtcatggtgacgaggaagtcgccggccggcgtccccagagacgcccattcatgggctttctcacgggtgagcgcggtctggtgggtcacgtcgaggccgatcatggtggtgcgtgcgccacacttgaacagatagtctgctgactctgggtcttgggagatgttcgcttcggcggccgggcttacattgccgggcagc

SEQ ID NO: 2981 - DNA, 38006 bp, Unknown
  R19_24m  MAG No. k141_10666
ccggactgggtgatgttgcgcacggcgtattcgacggcggcggcgccggaagccacggccagaccggcggtgccaccttcaagggcggcgatgcggtcctcgaagacgccctgggtggtgttggtcagacggccgtagatgttgcccgggtcagcgaggccgaagcgggcctcggcgtggtcgaagttgtggaagacgtagctggtggtggcgtagatcgggaccgcgcgggagtcggtggccgggtcggcctgctcctgccccacatgcagctgcagggtctcaaaacggtacttcttattgttctcggccatggtattctccttggttgtgctaggtcgcgaggatattttccttgccacccgcctgccgtgttcgggcggttggcgaggtgttggttatgaagttacgacgctcaaggtgcatgtcgcaagctgagcgttatcggggttgcctatagacccttataaacccttggaatcattgggatatgaggcggttacgtcgggcaaaatagtcatcaaaaatctcacgacacgccgagacacttccacgtctcttcacgacagaaatctaggaaatcatcctcaatttcctgaaatcctgtcactgaggtgacgtcagcgacagaatttcaggacgaatgggtttatttccgaaatttctgtcactgagacggattcaacgacagcaattcaggggatcagggatgatttccgaaatttctgtcgctcagatggaaccagcaacggaattttggggtggatggttttatttccgagatttctgtcgctaggagtttgagcgatctgttgaattcggcgacggaacctcaccagatgaataccggttagcgtgtccgtatccctacagactagtgtcaactgtgattatgtgacatccgtctgattgattggagttttctagtgtccgacgttacgttgtacgaccgcgatccgaagtacatcccgcgcgtggccgccgtgcatgacatgtgtggctatggcaagtgctcgctgaccgccgcgattccgattctttcggcagccggctgcgatgtctgcccggtgccgaccgccctgttctccgcacacacgaagtacgcggtgttcacgttccatgacaccacggatatcctctccggctatctggatgcctggcagaaggaagacgttgagcttgacggcgtgtactcgggattcctgggctcccccgatcaggtggcgatcattcagcgtctctaccgcgaatatccgaatgcgctacgtctggtcgacccggtgatgggcgacgccggtgaaatgtatcccacgtatacgccggaactgtgcgaggcgatgggtgcgctggccgacggcgccgatgtgctgatgccgaacctcaccgaagcgagcattctgaccaagcgtgactaccccggtcaggatatcgatgaagccacggttgacgagctgttgggcgcgctgctggagcttggcgcgaagaacgtggtgttgaagggcatcgaccatggcgatggcaaaatcgtcaactatatggtcagcgcttccaccggtgttgccggcaagatcgagctggctcatgaaaagctgccatacatgattcacggcacgggtgacgccttcgcatctgccctgtgcggcgcggtgatggccggccgcggcctggccgagtcggccgaaatcgccggtgagttcgtgcgccacgccatggtcagcacccgtaaccagccgcatttcgaggatcgtggcgtcagcttcgaactgaacctcggcgaactcaccgatttggtgaagtgaccgcaccttggctcccctctccgctcactgggtctgacgtattcagcgaacaactcggcgggttgtctgtcgtcacagggaagccgactggggagccttggtaaaccttctgaactaatggtggataaccaggttttcatccacacgttatccacaacacgccaaaccgcgtcatagtatccacatttgccggttgcgcttgtgctcttacataagtaacccgcacagtggaatcatgaacgctttaccacctacccagccgacgacgaagtccggcatcgacgccggtcttgcctttcaccagcccatgctggcttcacctgatccgcaggcaacgctgccttcggaacggattgcggccacgatgggcgaccgcaatctgacgcccaaacagttcggtgcgctcggcgagcagtatgccgccgcgtggctggaggaacacggttggacgaccttgagccgcaattggcatacccgttacggcgaattggacatcgtgatgctcaatcccgagtacacggtggtgttcgtcgaagtgaaatcacgccggtccatgcattacggatatccgcaagaggccatcacgccggcgaaacagcacaatctcaggaaagccgcctgcgattggctgcttgaccggcgtaatcgtgtgccgcatacggcagcccgtttcgatgtcgtcaccatcgtgcttcgggtgggcagaccgctcgtgcatcacatcgaaaacgccttctgaattcgtcccccaaaaaacagccacgttgcgaaacacattgcgaaaggagtagacatggctatcggcagcactctctcagtcggactgatcggccttaaggccttcatcgtccaagtgcaggctttcatcagccctggcttgccatacttcagcatcatcggattgccggatgcatcgttgtccgaagcccgcgagcgcgtgaaatcggcgtgtcaagccactggattcggttggccgcaaacccgcgtgaccgtgaacatgagccctgcggccatgcccaaacgtggttcgtcgcatgatctggccatcgcggccagcgtcctatgcgcggcgggtgccatagggcatgattgcttggaagataccattgtgctcggcgaagtgaatcttgacggctcggtgctgccgattcatgggctgctcccgatcatgctgcatgccgaggaacgtggcgtgcgcaaaatgattgttccccatcgcaatcttgacgaggcttcgatggtggatggactggatgtagtgggcgtgaggcatgtgggtgagctcatcgaactgatgggcggcgatgccacctatacgattcccgatacaccggttgccgacgagaccaccacggatcaatcgcccacaagccatcccaacgattgtggcgatatgaacgaggttctgggtcaggaacatgccaaatgggcgctgcaagtggcggcggcaggcggacataatctcatcatgaccggaccgccaggcagcggcaaaaccatgctggcctcacgtatgcccggcatcatgtgcccgttgaacgaggcggaacaactggaggtggcgtcgatacggtcgctgtgcggcatactgcctcagtacggcatcaccgacatgccgccgttcgaggcaccgcaccacaccgccagcacggcggccttggtgggtggtggcaacggcatcgccgttcccggcgcgatcacgcgcgcgcatcgaggcattctgttcctggacgaggcaccggaattcagcgcacgcgccctgcagacgttgcgcgaaccattggaatccgggtatgtggcgctttcccgttcaaaaggcagcacctattacccggcctcattccaactcatcatggcggccaacccctgcccgtgcggatactattacggcaccggcgaacgttgcgcttgccgggaaaaagaccgtatacgttatttctcgcgattgtccggaccgatattggatcgtgtggatattcagatggcggtgccaccggtctcgcgcattgccgcgcagagcgagacgatcggcgagtccagtgccgggatacaagctcgtgtgattcgcgcccgtcaagtggccaaggaccggttcagacagtatggatgggtgtgcaacgcgcaagcttcgggcaaatggctgcacgccaatacgtcgctgaaagcgatggaattggtcaatcgggccctgtccaatcatcaactcacattgcgcggggccgatcgcgccatgcgtctgtcttggacgctcgccgatctggccggccgcgtatcccccaccgagcaggacgtccatcagggcatcgaaatgagaacgaggatgacatgagtaacgctactgatatccgacaatctggcggcaccgcaggcagtgtggatcacaccgatacgggcctcgctgtttcgcgcaccattcccatgcctcccacggatacgttgtaccgcgccgcgctcacgttctgtcttgatggggcggatgtgatgatgtacgccacgctcaaaggcgcggaaagcgccgaatccctctggcacgcgttggcgcaatcccatccaagccagccatctggaatctgcggcccggcgctgtcacgtattgaccgcatgttcgtggatggcctcacccgatggggccgcaaggcgtcggcgaacgcgatgcgctccttccgcaatgcactggccggctggcataaccgcatgatggacctgccctcgcaagacatcatccaactggccgactggttcactatggatggcacgcaatggattatcggccccggccatccatgttggccctcgcagttggccgacctgtccattcgctccgattgggcgccaccgctgtgtttgtggatcaaaggcgatccacgcgcattgaccagttgcgccaaaccggtcggcatcgtcggttcacgggacgtgaccgaatacggccggtatgtggcacacaccgtagccgaacaggcagtcgttgccgggcatctggtcgtgtccggaggcgcaatgggcacggatgcggcggcacattggggagcgttgaatgcgctgcacggcagaatgcccgccaatgtgggcagaaccgttgccgtattcgccggcgggctcaaccatatcggaccgatgcgtaaccgcacgctgttcgaacgtatcgaggcgcagggtggtgcactgatcagtgaactgtgcccagggacgattcccgaagcccgtcgttttctactccgcaaccgcattatcgcggccatgtcttccacattgattgtgacgcaagcccggttgcgttccggagcgctcaacaccgcgggatgggcatgcgaattgctgcgcgaagtgtatgcggttcccggtgacatcaatcagccttgcaacgccgggtgcaataagatgatcggcgaccaccgggcgatgattctgtgtgccgccacatccactgaggatatatgccatgaacggcataagcccgttatggcggcatgcccaggcataccgaaatccacaggtcaggactcgtccgaaaacgaggaggccatggaagtgccggcaacgactccgttatcgccagcatcctcggaatcatcggcgtcacaggagtcgtcacaagattcaggtcattcgaaacgtcttaggaccaagcatactcagcctacactcgttcaatccaaggatgggccggcgagcgcaactgccgaggccggtgccaacaagagcaagggtgaagagccgccctcgtcgcatcagatgccggatcttcgtgtcaagccgaagctcgatcccgagaaggaagcccaacaacgtatcattatcgccaagctgccggaaatggaacgcacattagtggcattgattcgtgaatgccgtaaacgacatctcatcgtcaccccggacgcactattgcgtgtggcgcgagagacggtacccgacgagattcccaatatcggcaccatacttgagctactcggcgcattggagctgaagggagtgatcgagcgggatgccggcatactcaagctgagcagccgtgtcggctaatcggctttcatgacacggctcgaagactgttcggcgggtgtgcgagaatcgaacccatgagtccgaaacgtttggaagatatgtatgatgcggtgatcgtcggcgccggagcggccggcctgtcggcggcgttgggactgctgcgctcccccgaaatcaccgagctcaaggaacaaggcgtggacccgaagatcctcgtggtctccaaactgcagccgctgcgttcgcacaccggttcggccgagggcggcatcgccgcgagcctgggcaatgtggagtccgatgactggcactggcattactacgacaccatcaagggcggcgactggctcgtcgaccaggacgcggccaaactgctcgccgaatacgcgccgcagaccgtgatcaacctggagcgtcagggcgtggccttctcccgtaccgatgacgggcatatcgcccagcgccggttcggcggccacacgcgcgagttcggcggtgccccggtcaagcgcgccgcctatgcggccgaccgcatcggccaccagattttgcacaccttgtggcagcagtgcgtggccgccggcgtcgagttcgccgaggaatggtatgtgaccgacctggtgctcgccgacgacggcaagcaggcggccggcatcgtggcatttgacacgcattcgggcaagattcaggccatccacacgcgcaacgtgcttcttgccaccggtggcgcgggccgactgttccataccacatcgaattcctgggacctgaccggcgacggcatggcattggccttggccgccggcctgcagctggaggacatcgaatttgtgcagttccaccccaccgggctcgcgcacaccggcatcctgctgtccgaggcggcccgcgccgagggcggcatcctgaggaacgccgacggtgagccgtttatggaacgctacgccccggagcatagggatctggccgcgcgagacgtggtctcccgctccatcatggcggagatcgacgccggccgcggcgtcgccgacccgaaggacccggatggtccgaaggactgcgtctggctggacatgaccggcatcgaccccgaacgtatgaaggaagtgctaccgcaggtggtcgaaaccatcgagcagtacgcgaacctcgatccggccaaggacctggtgcctatcaagcccactgcgcattacacgatgggcggcatccccatcaccaccaatggcgaggtgtaccgttgggccgacggtgccgtgcaggtagtcgatggactgttctccgctggcgaatgctcttgtgtctccgtacatggtgcgaatcgtctgggcggcaattctctgctcgacgcctgcctgttcggtacacgtgctggtcagacgatggccgcacgcatcgtcgagaacccggttgactcccccatggccgatgattcgaccgatgacatgctgaccgatgccgccgatcaggctgccgattcccgcaaggcagagcttgacgaactgctcgccggaccgatggacgattcagacgatggcgggcccaccgccaatccttatcagctcatggcccaactcggatcagtgatggagcaggctctggccgtacgttgcaccgctcagaccatcgatacggcgttgactcagatcaacaacgacatcacaccggttgccgataccttgcgggcccatgacaagaccgccgctctcaatcaggaggtcaccgccatctgggaagtccgtcatctaatcgaactggccgaggccatgctgcacgcttccgaatcccgtcaggaatcccgcggatccatgcagcgacttgatttccccgaacgcgacgatgagcatttccttgctcactcgatggtcgccgatgatggtccggcaagtttcaagccggtgcacatcaccgactatccacccaagaagcgcgagtactgatccgctggtggtaataccaagccgcctagggcttgtggcacaataggttggctgatattggacttgacatcccactgtttcatggaggcagaacatggctgaggcgagcaacacgacggttaccctgcaagtgcatcgtttcatgccgcgacccgagcgcgccgaacgtgcacgcggcggcagcccgttcgccaagaaaagctccccattcggcggcggctcggattcggcggcacgccgtcgtccgcgcggcaagcagtgggtgcaggaatacacgattcccgcgcgcccctcggacaccgtgctcgactgcctgctgaccatcaaacgcaccgtcgacccgacgctggccttccgctattcgtgcggtcacggcatgtgcggttcggacgccgtggccatcaacggcacccccaccctgctgtgcacggccaccatccgcgattgggccaagcagcccggcgccatccccgaagtcgatgacgaagggttccggcacaccggcaccgagtccgaagaatccgacgattccgcggaaaacggcgcaaacgcggcagccgaccaggactcggccgcaaacggctcgctgggagtcatcgaactggcatccctgcccggcttcccgccgcagcgcgacctcatcgccgacatcgacccgatgctcaaccaaataaggaagctcaccccatatcttcaggcggacggcgtgctcgccaccaccgccgaaggcaaggtggacgtgttcgaatacctgcagaaccccgaacaactcgccaaatacgagctgctgagcaactgcatcgcctgcggcgtgtgcgaaggcgcctgcccggtgtacgccggcggcgacgctttcatcggcccggcctcgctgatttgggcctcccgtttcgtcaacgattcgcgcgacaccaaggccatggagcgtatggacgccatcgacaccgccgacggcgtggccgcctgccagtccgtgcgcgcctgctcccgccactgcccgcgcggcatcgatgtgggcgaggagatgtggcagatcgtggccaaggtccgcgagcgctaagccgcgccacgaccagctacggcaatcgctgcaacacgtagtcgatacatccaccgggtgcccgcacgagagaagacataaaggaacgaattatggacagaacgcagtacaccaacctcgccaaggcatgggaattcaccgaggaacacgcgcgcgaacgtgaatccaatgcgttgaccgacgcccgtacggccgccgacaagtccggccagttgcagggttcggccgcgcaggcccgtctgctgggcatgctggtgcgcatcaccggcgccgcttcggtcatcgccgtaggcaccggctcactggtggagaccttgcagctcgcccatgcgctggataacaagggcctgctgactgcggtcgattccaccgctcagggcatcgcgctgattcgcaaggcgttcgccgaactgcaggatgagaccgacaccacgttgcgtgcggtgaacgccccggccagcgtgtttctgccgcgcctcaacgccaatgattacgatctgatcgtggtggcgggcgacgccgagaactatgccgccacgttcgcccaggcctcccgtctgctgcgcgcgcacggcgtgatcgtgttcaccgatgtgctggcgttggaggacggtcagggcggcatgattaatccggccgaccgcagcgacaaggccatcgccatgcgtgagctgctcaccaccgtcgaagatgacgaaggtttcgagtccacgcttacccctgacggcacaggcctgctcatcgcctacaaaaagtaactctgcccttggctcccctcggagaggggagccactctatctcgcttacctcacaattgcgctgacggccacctccacggcttcgtcggcgtcatcggtcacggtgaccagtttcgggtcgattgccgaaatcatgccgtgctcggccaccggaccgttgagccagtcaaagagcccctgccagtattccttgccgtagagcaccaccggaatattcgccaccttgtgggtctggaccaaggtcagcagctcgaacatctcatccagtgtgccgaagccgcccgggcacacgatcacgccggaggaatacttgacgaacatggttttccgcacaaagaagtaccggaagctcatgccgaggttcacccactggttcaacccctgctcgtgcggcaattcgatgccgagtcccacggatttgccgccagccagtgccgctcccctattcgcggcttccatgatgccgggaccaccgccggtgatgacggcgatgttgcgcttggctatctggctacccatgcgccgggccgccttgtagatcgattcggtgcgctgggtgcgtgcggagccgaaaatagagaccgcaggtccgagctcggcgagcgccccgaaaccgtccacgaattccgattggatgcgcagcacacgccatgggtccatgtgcagccagtcggtgtcctggtcgggtttcagcagattggcggtggtattgtccgagggaatcatctggccgcgtagaatcaccgggccgcgatgataggtgtcgcccagcggcgagacgtcctccaagtcgaccgggttcaccagcgttgcggcagcctcggttgccgtctcggcctccaacgttgccgcatcattcgcggctgtggcttccaatggttccatatcgtccacgactgtggacttggatgcggcctcggctagattctttgcttcagcggcctttttgccgtcgttcttcttggatttcttctgcttctttgccatccaatatcctcctgtacggtgctatcgactcttcgcattctagcgcctgaagctctgcatacgttttccgcgaaatcatccttgacttcgtgaagaacgtacggtgagtgacactcagcgtacggttttcacgaaataaggcctcatctcgtgaagaacgtacggtgagtgacactcagcgtacggttttcacgaaacaaggccaacaatggagtagggatcgtctaagccatcagtggcggaagtcaatctccacactggcggtgccgtcggcgagggtgccggggtgttccgtgggcgtggtggactttgtggtgcgaccggtctgaccagcgccatcgccatcaatcgattcgtcatcctccgcatcggccgctgctgcggctgcggccttctcgaatctcttggactgacggctcagcagcacaccggaaatcgcggcggcgatcagggaggccaccagcacgccgaagcgcgcctcagcggaaagttccgcgttcttgtacgccagcgaggcgatgaggaaggacacagtaaaaccaatgccgcaggcgacggcagcgggaatcatgtcacgtacgcgcagccccttggccatcttgagcccgcccacatgcgtggccagccatgcggtggtgatgatgcccaaaggtttgccgaccaccaaagccacaatcagtgcgataaccaacggcgaagccagcaacagcgggctcaccgactcgaagtgcacgccggtggcgaacagggcgaagatgggcagggccagcagtgcggagaatggctgaagcttgttggcatagcgttcggcacgcggtgaaagttcgccgtgcatttcacgggagggagtcagcaggccaaccagcacgccggccagtgtgggatgcacgcctgcctcgaacatcatgatccaagcgaggacgccgacgatgccgaccgcaatccacggcacttttttcagtcgtacgaggtatgcccagatgacggcgcacacgacgatgccgatgaaccaataccaggcgttgatcgaggagaagaatacggcgatcagaataatggccagcaggtcgtcgacggtggcaagcgtcatcaggaacgcgcggatcgaaccgggcagggccttggcaaacagggcgagcacggccagtgagaacgcgatatccgtggcggtgggcactgcccagccgtgcgacatctccgagaacggaatgctgctgccggtggtggtcagaatcagcgtgccgggttcaccaggcccgatctgagagaacaatgccgtgacggccaggaacaggatgggcggggcgatcatgccgcccaccgcgcacagcatcggcacggcggccgctttcggattggcgagcgagccggtggtgagttcctgcttcagttcgaggcccacggtcaggaagaagatggtaagcagaccatcctgggcccaatggccaatcggcaggtcgagattggtgtaggggatgaacagatgcgtttccgctacggtctcgaacgcatgcgcggtggcgggcaggttcgcgagcaccaggccggtgagcgcgaagccgagcatgatgagtccggaaatacggtctgaggcggcgattcgcctgatggtggaccaaagtcccttcttcgcgccggcggtcgtggccatcgcgtctccttgctgtactctcttggatgaaccgtatgtaatagtacggaatatctcaggacgttccgctccgggctgagtcgcgaagggcaaccttaccccacccctgtgtggccgactcaaacgggccaatacaattggaaaagcctcggaagcatttcgctttcgaggcttactgtgcgccagacaggattcgaacctgcgacctgctgatccgtagtcagctgctctaatccgctgggctactggcgcataccactgttgtccccgtggttcgggagtgcgccagacaggattcgaacctgcgacctgctgatccgtagtcagctgctctaatccgctgggctactggcgcatgttgtcttttcagacaactcgatatataatacacgccgttcagatgaatgcaactcggcgtgttgcggcgagtcgcaccatcctaatcgccaccgcaacggcgtatttactggcctcacgccgcatgtgcacggactcggtcaagcaaaaccgactacgcaactttgaggcgtccctgcggcacatccacggcttcgcgcaagagtttgggcgtactggaaccctctacggacgccttgtccacaatcacctgcttcacatcatccaaactcggcaactggaacatcgtgtcctgcaacgtacgttcgataatcgaacgcaacccgcgcgcgccggtcccctgcttgatggcgatatcagcaatcgcccgaatggcctgttcggtgaactgcaggtcgacgccgtcgacggcgaacagcttacggtactgcttgatcagcgcgttggctggctgggtgagaatcgccgtcagatcgtctacggtaagttccttcagcacactggtgaccggcaaacgtccgatgaactcaggcaacagcccgaactcggccagatcatcggcattgacctgttcgagcaattcctcgtctttcatgtcggcgtcgtgccaattcgcgccgaagccggtctctcgacggcccaatcgcttgcgaacaatatccgtcagtcccacgaacgcaccgccgcagatgaataggatgccgcgtgtgtccatctgcgcagtgtcctgctccttatgcttgcgcgtgccctccaacggcacggaggcgatggtgccttccaaaatcttcagcaacgcctgctgaacgccctcaccggacacgtcacgggtgatggaggtgttctcacctgatttgcgcgcgatcttatcgatttcgtcaatgtagatgatgccgtgctgggctcggcttacgtcgccatccgcggcttggagaagacgttggagcacggtttccacatcgtcgcctacatagccggcctcggtcagggtggtggcgtcggtgatgacgaatggcacgttcattacgcgggccaacgcctgtgcaagataggttttgcccacaccggtggggccgagcaacagaatgtttgatttggcgacctcaacgtcagccaaagggtcactgttgcggcgggtagcacgcgtctgggcgggagcggattgcttggcttgtttgccggtctggccaccgtgcccgttattcccgtcaagctgctcagcggactcctgaagctccatattgacgcgtttgtaatgattgtatacagccacggacaatgcgcgcttggcgttctcctgaccgatgacgtagcggttgagataatcgaagatctgagcgggcttgggcaggctcagcgaattgacctcggcatctttgacacgctcctcggagatgatgtccacgcacagggcgatgcattcatcgcagatggaggcgttgggaccggccaccagttttctgacctgacgttcggttttgccgcagaacgtgcaacggggtacgtcctcgttgtagctcaccacacgtcccatgattctcctttgccgaccgcgccgcaccgtcgaaccgccacgctgcgcattatcattgtcatccttgaaatacaatacccccggtcgttgccgaccgagggtattgcaatgttcggaagttttactggcggtgttccagcacctcgtccacgatgccgtattccttggcttcaggagcggtcaggaaagtgtccacttcgatgtcgcggcgaatcttctcgacatcctggccggtgtgcttggcgagggtctcctccagccattcgcgcatacgcagcatttccttggcctgaatctcgatctccgtggccttgccgaatccttggtcgatggccggctggtggatgagcacacgggcgttcggcagcatcaggcgcttgcccttggtgccggaggccagcagaatggcggcggcggaggcggcctggccgagacacacggtctgcacgtcgggcttgatgtactgcatggtgtcgtagatggcggtcatggccgtcatcgaaccgccgggtgagttgatgtacatcatcacgtcacggttcggatcctgggattcaaggaccagcagctgggccatcacgtcgtcggcggaggcgtcgtccacctgcacgccgaggaagatgatgcgatcctcgaacaggcgggagtaggcgtcctgggtcttcatgccatacggggtcttctccacgaactgcggcatgatgtaacggttggtcggcgcgggctgggctgcgcgggcggcggccggcatgaaaccggctacgccatgacggccggccaagcggtcggcacgggcggcgaactttgcttcttcacttgccatgagtctcactccccctgctggttgttgccgatggtgtccggcgtggtcacgagcttgtccacgaagccatagtcgagggcttcctgggcggtgaaccagtggtcgtattcgttgtcgcggtagatctcctcgagggtgtggccggtctgctcagcggtcagctcgctcatggttttcttcatgtccatgatgagctcggcgttgatgcgcacgtcagtggcggtgccgccgatgccgccggaaggctggtgcatgagcacacgggcgtgcgaggtcaggtaacgcttgcccttggtgccggagctcagcaggaactggcccatggaagcgcacatgcccaggcccacggtcgccacgtcaggctcgatgagctgcatggtgtcgtagatggccatgcctgcggtgatggagccgcccggcgagttgatgtacagccagatgtccttcttcgggtcctcggcggccagcatcagcagctgagcgcagatgcggttggccatatcgtccttgacctcttcacccatccagatgatgcggtctttgagcagacggttgaaaatcgggtcgacggggccggccgggacgtcatcgcccgccatgaccggcaaggtcgcaaaggtattgctcaccttgattctccttctaattactcgaacattgttcagactaccgccttgaagcgactgaaggcggcttttcgcgtgctttttggcgggtagcgtagggatttcgggttattccaaggtgtcgaggacgtcgtcaatgagaaggcgggtctgggaggcggcatcgtcgcccagacgcgggaagcgacgggcggcattggcggggctggcaccggcggctcgcgccacgttggacttgctggcaccatgggccacggctttttccgcgagccgatcgaccagtgaatcggcgacttggcgcatctgttcggccacccataattgggccatatccgcaggcaagtcgtagtcttcggccacatcgctggcggcctcctgaatggcggcccacaacaccatgaatggctttcgatagtagtcaatctgctcagtgagcggctcagcggcaagcgattcaagtgccgcacggacttcggtgttttctgacatagctttctttacctcggctcccctcagtctcactgtgttcgacagctcccctcagagaggggagccagaatatatgcatctacttacttacgactcagcaaccactttgatatcaacgacgacgtggccacggccatgccgactggcacgaagaaggtaatcggcgcttcggtcagctccatcaccaagcacatggccataagcggtgcctgctgtgaggccgaaagcaacgaagccgcaccgatcaaggcacacgcggttaccgaatcagtcggaaacatcagtatccatacgaggccgagcatcgcacccagcgtggaacctaatgcgatgccgggctgcagcacaccgcccgatgcaccggagcgaatggtcatcagcgtcaccagcgccttggcgacaaaggtgagtgccaacacacccagcaacatccagatattggactgggacagcgggaaaccggcgttcatcacggatccagaagagccgctcccaccctgaagcatggcccaaaacgaggccattccagagcccgctcccccgccagaggccgaatcggatacattaccgccgcccgtcagcaagttccatggagaggcggccgctgaagatgccgactgcatggcaccagcagtgccggcggtttcaggaatgaacgtgctgaatccaagttgcactgcggcacggccgttgcccatcacctgcggcacaacaatcgccaccaaaccggtgatgagaccagccagcggcatctgccacagaatggccttaccggtcggcttgtgcgcttccgcccattgcgaaccttttcggaacaatgcgccgcccactccacatgccgcaccgcagatcagagcgaacagcattaacgttggcgtggattccggttgcatggcggtgatgtcgtagaacaggcaatgccctttgatcgcaaccgccacgaatgcggcaatggcagacacgcccagtccaaacgcaaccttttcgatcgtcacatccaccaacaggatttcgacggcgaagaacatgccggccagcggcgcgtcatagacgcctcctagaccggcaccggcagccactgccaccaccatgcgccggtcgataccatcaacgccctcgatatggaacaggtcgcaaaaacgttgcgcgatcatggcgccgagttcgcgtggggcgacttctcggccgatcgaggcaccggagccgacgatgaaaatctgcaacaccacatgcacaatggtttgccagaaaggcattcgctttcccgccacggccttcttgactgagggcaccacagtcgttttgtgtcgtagcagataccagataatgcccgcgatgccgagtcccacggtcatcgatatcacacggcgtgcagcgggcacgccgaatggaccagacaattctgggccttcgatgtagccgagcagcacatgttcaacgccgtagagcaacagggtcagcagacctgctcccacaccgatgagcacgccgagcacaatggtcgccgcagcgagccaaccaaggcgtttgatagtaaccgttggctgcatgtcaacctccgcacgctatgcaacgagtatgccttgggaactcccctcagtctcgctacgcccgacagctccccccaaaggggagccaaagaaatagtccttttaccagaataggaagagcccggaaccgtgaaacacgattccgggctcaaacaatcacgctaacgcgatgaggctatgctcactcagcgtccttggcgtcatccttggcggacagttcgtcggccacggcggcagcagcggaagcggcctcgacggactcggactcttcgtcctcagcggcctcgcccaggaagccggagaggtccacaacctcgccatcagcggtgaacttgacggcgcgcatgccggcgagcagacccttggaacggccgacttcctgcacagcggagccaagctggccattcttgatgatggcctggatgaagttgttcgggtccatgccgtactgctgggcgatggaagcgaggaagttgaacacgtcggactgggacacctgaacgtccagcttctcggccagagcgtcgagcaccatctgatcgcgcagatccttctccacggtctcctcggcctgagccttctgctccttggtggccttctccgggtccggggtcatgcccttgagctgctcttcgaccatgttggccttgacacccttcggcaccgggatctcgaggccttcctgcagcttggcgatgaaggcatcgcgagcctcggtggcctgacgaccttcggcgtcctgagcggcagccttgcggatgtcagccttgagctcgtccagagtgtcgaactcggaagcttcggaagcgaactcatcgttcagctccggcagttcctcagccttgacggagttgaccttgaccttcacggtggccttctggccctcgtgctcgccggcttccagcgtgccttcgaaggtggtctcctcgccggcggacaggccgtcaagagcctcgtccagaccgtcgagcatggtgttggagccgagctcgtagctcacgccttcctgggagtcgacggtctcgccgtcaatctcagcagtcaggtcgatgttggcgaagtcgcccttggcggccgggcggtccacgccgaccaaggtgccgaagcgctgacgcagggtctcgaggcgcttgtcgacgtcctcatccttgacttccggcttggagatggcgatctcaagaccgtcgatttccggcagttcgatgtcaggacgacgctcgacggtggcggtgaacttcagcttggtctcgtcgttggcggactgcggaacatcctgcacgtcgaactccggctgagccatcggacgaatcttcttctcatccagggccttggagtacagctccgggaccgcgtcgttcacggcctcaccggcgacggcggcgaaaccgatgcgctggtcgatgatcttgccgggaacgtggcccttacggaagccgggaacgttcacctgcttggcgatttccttacgggccgcatccagatacgggttgagctcttccggttcaacagtgacggtgagcttcaccttggtgggctcgaggttacgaacgctgatcttcacgctaatgactcctcaaaagtcgttatttcttacagttctgccgtaaggcaacctctacatgataacgccacttacggacggtgcaatgagtttcacctgccagtttcttgcgccctgctcgatcaggaacgtctcgacgtccacttccaccgggtcttccacccagcacaggttgcgtaggatctgtggcttgatgatcatctcggccggcgtgcgggtgtcttcggcgatgcggttgatcacacgccgtacccgctgcagacggtcataacgctccggatggcgctgttgccacagtcgcatggatcggggcgcgttcaccacaccgttttcgtcctgttcgggggcgggcatggtaggccattgggtgggctccagggccatggcgcggtcgatggcctgcttccagaccttcggcttgaccgtacgctgaatcggcgcgtaccgctcgaacattttgtcctgctcggtgccggtatgaatgcgcacacgctcgttcagggatcggagtgcgcggaattgggcggcattgtgcggcttgttggtcgcggcctcgatgattgacgaatcggtcaataacaggctgggagcgatgtcgtatcgccgggcgagccggtcgcgctcctcccatagggatttggcgatggccaagcccctcgaatcacgactcagctgggtgatgcgcgagatacgcagccaaggaatcggatgaggtttgcgcggggcaaggcccgcaaccaaagcgtgagaaaactcttcagcggcccactcgtccttgcctgcggctttcaggtcacgacgcatcaaggtttcgagttcgataagcacctccacgtcgagcgccgcatagttgcgccagtcgcgcggcagcggacggtaggaccaatcggcggcggaatgctctttggccagcgtgatgccgaggtagtgttcggtgacggcggccagaccgaagcggtgcaggccgagcaatcgcgccgctatttccgtgtcgaacaaggccttgggtttgagtccgatttcggcgaatccgggcaagtccatcagagaatcatgcagaatccatgtagcatcgcccacggcgtcattgaattcattccagtcagctccggcccgtgtcagggctacgggatcaagcaaggcgatgcccgcaccttcacgtttgaactgaatcagccaatcctcatgtccatagcggaatccggacgcccgttcggcgtcggcggccagcgagcccgtcgcctcggccagcgcatcgcaggctcgatgatagccatccagcgacgaagtgacatcgggcactcccccgcgaggctctttcagcagtcggggttcggtgtcacggacgtcactcaactggcgtcatcctcctcaaaacggatggtggatctgatgaatgcggcccacgagcggatttgtgcgccggcgtccatagtaccgtccggtccggtcccgtcaagcggggtccatgagacgcgaatctcacacccggcgctggtggagccggccatcgaaccaaaagccgtgttttgggtcacggtgactgtgccggataccgaatccggctcgatgccgtcgaaatagtcgcacatgtcatcccagtacatgccgggggtcagagaatcgttttcggcggtttccagcggcagccgcgcgaacgccacgcaacgccagttggaatcccggtcaatgcgcagctcatgagcataaagcatcatgatccagcctgtggcgattcgtgattcggcatcgttgccaagaccggcggaaaaggcatcgccgagggcacgctctcccgcttcgaattccacgccgataccataatcggccaaggtggaaggcacgggaatctcccgatagcgcacgtcatggatgcgcttcatggtgctgacggattcgacagctgcccatacttcatccggcacaccctgagggcgtacggggcgtccgtcgttggacgctcccataggaaatgcgtagatgtcggccatatctctagggtatgggcgaacgggccgaatcgtggtatttacgcgcggttcggccctgcaatttaaaacacggtgaagccgtggtccttgaactggttggccacccgcgaacgggtggcggcgttgggtcccttctggttctccagcgggtatgggatgcgcagttcgtgccacttcgggcggccaagctggtggaatcccagcacgtcgatgtgttcgacggcatcaccgaaggactcgcagatcttcgccacgttttcgacgttctcttcggagtcggtcaggcccggcacgagcacaaatcgtacccagatcttcttgccggccttggccagtcgctggccaaaatcgatggtgggctgcaaggtgccgccggtgaccttgtgataggtctcctcgtcgccggatttgacgtcgagcagacacaggtcgatgtcctcgagcatctcgtcggtgtagctcgtgttgaggaagccggacgtatcgaggcaggtgtgcacgcccatctccttggcggcatggaacacacgcgagacgaaggcgggctgcatcatggattcgccgccagagaaggtgataccgccatgcgtggccttgaacaggtccttgtaacgatcgaccttcttgatcatggcgtcaaggtagacgggcttgccgtcgcgcatcttccaagtgtccgggttctggcagtactggcagcgcagcgggcagccggacatgaacacggtcatgcgggtgcccggtccatccacggaggtgttgatgtcccaagagtggacgaagccgatatcgccggatttcagggcggaaaggcggtcacgtcggtcgagtccgattggggattcaaagccggaaaggccgcccatcaaagtctgcgaggcataggtcttcgattccttgagcatatgcctggtcgtggtgcggaacgtgggtgttgcgggcatagttgtcctcctgttccaaatgatgcgaaggtctgtgggaaataaggaaggggtggagccgtgccccaccccttcagttagtcattgccgcggttcgcggggttggtcatcagtcgacgacggcgccctggtggaaggtacgggagatgacgtcgagctgctgctccttggtgagcttgacgaagttcaccgcgtagccggagacgcgcacggtcaggtgcgggtacttttcggggtgctcgacggcgtcctccatggtctcgcggcgcagaacgttgatgttcgcgtggtagaggccgtggccgttgcccgcgtccaggatgccgaccaggttgccgatgcgctcggcttcatcgcggcccaggccatcgggggtgatggtgttggtcagcgagatgccgtcgagggcgtcgttgtagtcgatcttgccgacggagaacatggacggcagcatgccgtgcgagtccatgccgttctccgggttggcgcccggggcgtacggggtgcccttcttgtggcgggacgggaaggaaccggtgttcttgccgtactccacgttggaggtgatggtcaggatggactgggtcgggacggcgccacggtagacgggcaggcgcttgacctggcccatcacggtggagacgacccacttggcgatgtcgtcggcgcggtcgtcgtcgttgccgtagaccgggaactcgccctcggtgcggtagccgacgaccagatcgtcgtcggcgccttcgacgtactcgtactcgtggccttcgaggttcttggcttccttgttggtgatcgggtacaccttggcgtacttgatggcggacagggagtcggcggcgatcgacagaccggacatgccgcaaccgagggtgcggtacacctccttgtcgtgtagggccatctcgatggactcgtaggcgtacttatcgtgcatgtagtggatgatgttcagcgcttcgacgtaggtttcggacagccactcgagcgccttctcgtagttgttcttgaccttctcgtagtccaaggtgccgtcggcctccggggcgatcgggtcgatgacgcccttgtcgatgacctgcatgccggtcatctcatcgcggccaccgttgatggcgtacagcagggccttggcggagttcactcgggcggcgaagaactgcatctgcttgcccacgcgcatcggggagacgcagcatgcgatggcggcgtcgtcgccccagtgggaacggatttccttgtcggactcgtactggatggccgaggtgtcgatggagatcttggcgcagaagcgcttgtagccttccggcagcttcggatcccagaagatggtgatgttcggctcagggccaggtccgaggtgctcaagggtcagggtgttgagcagacggaaggaggtcttggtgaccatcggacggccatcgtcgccgaagccggcgtcggaccaggtcgcccagtacgggtcgccggagaagatgttgtcgtagtccttggtgcgcaggaagcggacgatacgcagcttcatgacgatgttgtcgatgagctcctgggcgtcggtctcggtgatcttgccggcctcgaggtcgcgctcgatgaagcagtcgaggaaggcggagttacggccgaaggacatggcggcgccgtcctgggacttgatggaggccaggtagcccatgtaggtccactgcacggcttcctgggcggtctgagcagggcgggacaggtccaggccgtactcgttgccgaggttgatgagctgcttcagagccttgatctgctcgtcgtgctcctcgcggaagcggatccagtgctcgatctccggctcggtgaagtcgttgcggtacgggatggagtccttgtcgcgcttcttgaaggcgatcagcttgttgacaccgtacagggcaacacgacggtagtcgccgatgatgcggccacggccgtaggcatccggcagaccggtaaggatcttgttgtggcgggcgaccttgatgttcttggtgtagacgccgaacacgccgtcattgtgggtcttgcggtacttggtgaagatcttcttgatctccggatccggctccttgccggcttccttgatggcctgctcgaccatacgccagccgccgttcggcatcatggcgcgcttgcagggcacgtcggtctgcaagccgacgatcacgttgtcgacttccggggagtcgatgtagccggccgggaaggcatcgatgccagccggggtgtgggtgtccacgtcgtagacgcgctgcttgcgctccacggccaggtagttgtcgtcgaggtacttccacaggtgcttggtcttctcggtggcaggagccaggaatgtctcgtcgccctcgtacggggtgtagttcttctgaatgaagtcgcggacgtcaatatccttctgccagttgccctcggtgaagccggcccatgccttggcgtcgagctcctcttgggagacagctgcattttctactgcggtcatgtcactccttaaatggggttgtaggtttcgcatcttcacggaacccttggttcaacagtgtagttggcacttgcttgggaaaagccgaaattgggagtgagctatctcacattgttttttgtgaacgctaccattccaatggtttctaggtattgatggggctattgcacgtctccagatatgggaaaccgctcatactgtgatgttcgtatgagcggcttggtgagcggttcggtcttgagattgacagcagaaccgtatccgtctgttttggccgtcagtcttcatcgttcgcttgcgcggatttcacaccgtagttcttccagcgccagttctcctcctcccatctggcgttgcggtccaccacgatgtcccaggcgtgttcggcatcttccttggtcttgtacgggcccatgcgctgttcaatcggtgagaccatgcccagctcggcctgcttcttgacggtgttgaaataccactgcttcttgttatcgtctgtcattggtacctcctcaacggtattacttgctcccgctggcgggagcaatatatgtttattccctgaacgcgttggtgacgggcagtcggcggtcgcggccgaacgcgagggccgtgaccttcggtcccaacgggtattggcggcgcttccattcggcgcggtccaccaatcgcatcacagtgtccacggtgtcctggtcgaagccgtcggccaacaggtcggcgcggccgtgcgcgtgctcgatgtatgcagcgagcaccttgtcgagcagcgcgtattcgggcagggagtcggagtccttctgcccggggcgcaactcggccgagggagccttctcgatggatgagaccggaatcatcacgccgtccttcaacgggatgccggcgttgccgtcctcgttgcccacgatcttgagcccgccgataccgacgcctgcggccgcggccttgttacgccaacggctgatctcccagacacgggtcttgagcaggtccttgatgggtgcgtagccgccgaccgcatcgccgtagatggttgagtagccgcaggcgagctctgacttgttgccggtggccacggcgagcaggccgcgagaattggaactggccatcacgatcacaccgcggatgcgggcctgcaggttctcggcggagacgccatcaaggtcaagttgctgttggtaggcgttgaacaatggctcaataggctggacctcgtaatgggcaccgatgttggaggccaggtcagcggcgtcgtctttggaaccatcggaggagtacatggagggcatggagatgccccagacgttctcgccgccgcatgcgtcggccgccatggcggctaccagtgcggagtcgatgcctcctgagaggcccagcgtcacgccggtgaagtggttcttggccatgtagtccttgaggccgagcacgcaggcagtgtatacctcttcgtccgggtcgagttccggaacgatctcggccttgacctgatgttcggcggtggaatcgaagtcccagaacgtcaggttttccatgaacatcgggccgcgttcgataagcgtgccgtcggcatcgaccacgaagctgccaccgtcgaagaccaggtcgtcctgaccgccgacctgattcaggtagatgaccggggcgttgacttcggcggcacgacgctgggcgagctcgaaacgggtgttggtcttgccttcctcatacggcgagccgttgatggtgagcagcaggtcgatgttcttggtggccaggtcggccaccgggccaccatcctgccagatgtcctcgcagatggccacgccgatggtggcaccatccacgtcgagggtcacggaacggtcgccggcggagaagatacggaattcgtcgaacacgccgtagttgggcaggaagtgcttgtcgtagccggcccagaccacgccctgatgcaataccaccagtcggttgcgcggcttggaggtcttacgatcagtgcccacggtgccaaccaccacgaacagattgccgaggccgtcgtcgttgagctgggcggcgagttcgttggccttgtcccatgcggcttggcggaaggtgcggcgcagggccagatcttcgatggggtatccggtgagggtcatttccgggaaaacaaccacttgggcattccctgcggcggctttacgggagtagtcgagcactttggcggcgttggcatcgagcgcgccgacgcaggtgtcgatctgggcgagtgcgaagcgaagctgtgtcatagcttcttagtgtagccgcgtatggcgtcggattgcctgttcttccggcttggcgtcattcattaggtcgtttttgcgttcattaggtcactgcaatgcgatatcagtcgttgcaatggcgcgattccaacaaccagtatcgtcgttcaccgacctaatggacgatgaatcgacctaatgaacgaatgccactccccctcagtcagcttcgctgatagctcgtcctgcacttatggacgggcgaggcccgcgcatatctggttcggctgtcgcctcaccttcggctgcagacagcccattgggctgtctgcctaacgcctcagcctccagaggggagccaaaaaaggatttacctcagctcgttgagcacgcgcagggcggcgttgacgtagaagttgacgaaggtgggaatggattcgtcgagacccacgaaatgcgggctatgccagtcggcgcaaccttcctggccgtttgacccgacgaacgcgaacaccggcaacgtcaccttggcgaattcgcagaagtcctcccccgccatcgactgacgtatcggttcgagctgcgcgtagtcgttgacatccgccgccacggccttggcaagacctggatcggagaccagcgggtcttggaaatcatcccagaccacatcggcgctgataccgtatgcctcggcggtgtgttccaccacttccttgaatcggcggccgaccagattgccatccgacttgtggaaatagcgcacagtcccttggaatccggcttcggcgggcaccacgttccacacatggccgccgtgcacttcggtaacggacagcaccagcgggtggaagggcgtgacgttgcggctcacgatggtctgcaggctcagaataatactggcgagcgcttcgatgggcccggtgcccttgtacgggtagccggcgtgggtgccttgggcgtggagggtcacgcggaatttcacgcagccggccatcatcggctcgacgccgatggccagctggccggacgcatagttggggttgttgtgcgtgccgataatggcttcgacgtcatccacgagtccggcgtcgatcatggcgcgagcgccttggccggtctcctcactcggctggaacagaatcttgattgagccggcgaacttgtcacggtgctcggcgagccagaaggcggcaccgagcagaccggtcatgtgcaggtcgtggccgcagccgtgcatcacgccttcattgacggagctgaactccagtccggagtcttccacgatgggcaggccgtcgatgtcggcgcgcagcccgatacgcggcccgggaccggcctcgccctgaatgagccccacaacaccagtctccagcgggttgtgcaggatctcgatgccgtgcgccttgagctggtcggtcagatagatgctggtgtcgaattcacggaaactacgctccggatgggcgtgcaggtagtggcggatggtgatgagttcgtggtcgatgtcgatatgttcactcatggttcccgattctagtagcgcgaagaatatattgcggccctcgcttcatattggcgagggccgcgatctatggggtcagtatgccttgttattgctggcgtttgagcagtcgtttggcgatggcgttggcgatgccctgcaccacctggaccagtacgatcatgatgatcacggccgtccaggtgacggtctggtcgaacttctggtagccgtaggcgatggcgaagttaccgagaccgccaccgccgatgtagccggccatggcagacatgtcaagcacgccgatgaacaggaaggcgtaggccaggatcagcggtgccagggcttcggggatgagtacggtgcggatgatggtgagcttgccggcacccatcgaacgcgcggcctcgattactcccgggtcgaccggcacgagattctgttcgaccagacgagaagtggcgaaggtgcacatgaccaccatcgggaagatggcggccacggtgccgatggacgtgccgaccacgacgatggtgagcggctgcatggctgccaggaaaatgatgaacggaatcgggcgcacgatgttgacgatgatgtcaaggatgcggtagacgaccgcgttctcgaacaggttgccggggcgggtgccatagagcaccacgccgaggatcaggccgaggaatccgccgatgacaagggtgacgagcaccatggtcagggtctggccgatggattcgaacaatagtgggcgcagcacgttccagtcgctacgcgagttggcgaggatgatcatgcgttgtctccttcatgtgcggcggcggatacagcgggcgcggtggcagtatcggccgccagtgggtcatgggcgcggtcttcggcgtaggaggcatgtccggcaactgcgtcggcgtaagccacgggctttgcggcggtgccgaagtcaatgacgtcgctattggcggcgagctcgcgcaggaattcgtccacgtgccagccgggcccgttgaattcgtaggtgatggcaccgatggcggtccccttgaccgtgtcgatgccgccgtagagcaggctggattcgacgccgtatttggcgatgagttcggagatgttctgtccggatgccttgagttcgtggccatggctgccggaaacgtccttttggcggatgagcacggtgacgatgcggcccgaccattcgtggtgcaatcgctcgacccggtcttcctcgggcaggccggacagggcggtggcgatgaatcgcttggtcaccggctgctggggcgcggcgaacacgtcgtatacgtcgccggattcgaccacgcgtccggcgctcattacggccacgcggccggcaatctgctggaccacgttcatctgatgggtgataagcacaatggtgatgccgaattcctcgttcacacgcttgagcaaggccagcacttcggtggtggtttccgggtcgagcgcgctggtggcttcgtcggcgagcagaatctccggattagtggccagtgcgcgggcgatgccgacgcgctgcttctggccgccggacagctgcgaggggtatttgtttgcgtgctcactaaggcccacgaattcgagaagttcgttgacgcgacgatcctgatagtccttgcgccagtgatcgagttgcagcgggtaggcgatgttctgcgccacggttttggtggagaacaggttgaactgctggaaaatcatgccgattttctggcggatgggccgcagcttggtctcactcaaagaggtgatatcggtgccgagcacggtcacggtgccggaggtgggtcgttcgagcgcgttgataagccgaaccagtgtggatttgcctgcaccggaatagccgatgatgccgaagatgtcgccgcgatcgatggtcaggctgacgtcatccacggctcgtgcgatgttcgcgccgcgtccgcgtgttttgaattccttcacgacatggtcgaaggtgatgatggggtcgctcatagtgctccctgatgctggttgttgatgtccggtcacggaagcggagcgaatcccgattgttggctcgggtactcgctccgcttggtggtaatggctatggacaggttagtcgtgcactcgtatcagccacggctcactgctgggctttggcgtccttctcaatgtcggacaggaagccttgcagctcgctggcgctgaacttgtcggcgaacaccgcggtaccgccggagttctcctgcagggcgtcgagcacatccttctgctggtagatggaaacgagcttcttgtaggtctcgttgttcacgtccgccttgcgggccacccacacgttgatgtaggggcgagcttcttcggattcggcgtcatcctggtagatggcgtccttcgggttgagaccggcgtcggccacgtagtcgttgttgatcacaccagcggcgatggtcgggtccttcagggtggtggccacctgttcggccttgagcggggtgaccttgaccttgctcttggcttcgtcgatgtcggccggagtggagaaggcggtccagtcgcccttgagcgtcacgagaccggcggccttgagcacgccgatagcgcgggcctggttggtttcgtcgttcggaatggtgacggtgtcgccctgcttcaggtccttgatgtccttgaccttggtggagtacacgccgagcgggtagatggcggtgccgccgatgggctgcaggtccttcttgttgctcacgttgtagttggccaagtagagcaggtgctggaattcgttgaggtccagctcgccggagtcaagggccgggttttcggaggtgtagtcctggaagtcgacgatgtcgacgtagatgccggccttctcggcgtcctgcttgaacttgacccattcggggttggtagcgccgaccacgccgatcttgaccgggttgcccttgctgcccttggcggacgactcgttggcaccggcaaacgcgcggtagccgaagaacgcggccacggcgataatcgccacgaccacgatggtgatgatgacgttgcggacggtgtggttcacacgcaccggctcgttattgttaggagcggccggagttgccgactgggttgctgctgtcattggatttcctctctccaaaattgatgtcgggtaacaccataacgcgcttgaaccgcgaaagtgacggaaaatggccgattgccgtataggtgtcttttatggcgcgcatgcaatggccgggattcgtgcgtttgataacccgctataggcgtgccgaacacgccggaaagcacgtcgagaggggctttgacaatggaagctatgactaccgatactgccaatgccgatatccgagccgtattcttcgatatcgatggcacgctcaccagtttcacgacccatacggtgccggattccacaatcgaggcgattcaccggctgcaggccgcaggcgtcaaggtgctgatttgcacgggccgcgcgccttcacagatgcacgtggtgctggataccatgccggtgacgttcgatggcgtggtggcgttcaatgggcagtattgctttgatgacaccggcttctttgcctcgcaggccttggatactgctgatattgaggtgattctcgactggctggaccgtcaccccgatgtggtgtgcaatttcggcgagaaggattacgtgtacttcaaccagtccaatgatctgcttcgcgccacgtggagcaaactgggcaaaaccgcaccgacccggtattttgaggacccgcgcacccgcgcgctggatcatgagactttccagatcagtccctttgtcggacccgagttggaggccgaactggtgggactgtgcagcaatgtgcgcggggtgcgttggcatccggatttcacggatctgattccggccgatggcggcaagccgcgcggcatccagcggttcatggcgcattacggcatcacgcgcgggcagaccatggccttcggcgatggcggcaatgacacggatatgctcgcctacgccggcatcggggtcgcgatgggcaatgcgaccgccgagccaaaggccgccgccgattacatcaccgacgacgtggaccacgacggtgtgcgcaatgccctactgcatttcggggtgctacgcgattattgatgccgtagcgcctcgaccgggtcgagctttgccgcgcgcctagctggatagtagccgaaaatcacgccgacagcgatgcagatgcccactgccagtccgatggactgcacggaaactgctggcgcgatactcatgccaccggcgatgccggacaccaatccagcggcgcccaacgacagcaagtagccgatcaacgtgccgataagacctccaagcactgtgattgcaatggattcggcgaggaactgcgcggtcacgtcacgccgagtggcacccaatgcccggcgcaggccaatttcgcggatgcgttcggtaacgttggtgagcatcatgttcataatgccgatgccgcccaccagcaacgagaccccggccaccgaacccgccagcacctggaatgcgctcatgaagctggaaagctggtcgatggaggattgggcgcttacgaccgacagattctggtcgatctgttcggttgggatacgcatgatgcgagcgacaacggtcttcgtctgttccgtgagctggtcgatatcaaccccgtccttggccagtccgtagatctgcatgtatcccatgttcgaggacgcaaaccgcagcgccacagtggtggcaggcatatagatattcacgctgtcgccgcccatgccgcccatcaatccagacgactcgaccacacccacaacggttgcttcattgccgtcaagcgtgacggttctgccgatggcgtcaatgtccgcgctgccgaacagcttctgcacgccctgcccgtcgagaatcaccaccattgcaccactcgttgcttcactcgatgtgaaggcccgtccacgaccaatcgtcactccggatacatcgaagaaatgctcgtcgacaccggtgatgctcgccgacaccttgtcggtggtaccgggcgcggcgattgacgaggcgacaccatagttcgtcggcgagaagtactcgtagtcggtcagttcctcgcgcatcgcagtgatctgttcgtcgtcaagggtgccgacgtccgtgtaaatcgaaatcgtgcgcgccgcgttcatacccagttcgccgaccagagagtctcgaatgccaccgatcagtgaggtcatggtaatcaccgcggcaatgccgatgacgatgccgagaatggtcagtgcgcttttgcctttgttcgccctcagtgcggagccggtttccgccagcagatcccgtgttctcatcggtacatcccttcacgcagtacgccgtcacgcatgtgcaggcatcggtcggcgcgttcggccacttcggggctgtgggtgatgagcacgatggttttgccttgctgcttgagctgttcgaacgtgtgcatcaccgcatcgccggttttggagtccaggttgccggtcggctcgtcgccgagaatcagcggcgggtcctgtaccaacgctctggcgatggccacgcgctgcatctgaccaccggagagttcattggttttgcggtcgaacagttccggactcaacgccactgattggagtgctttgatggcacgcccttcccgttcacgcaccgggcagtcggaataggccaggggcagcatcacgttgcgcagcacgctggtgcgcggcagcagattgaaggattggaacacgaagccgatgagccacccgcgcagttcggagcgttcgtcatcactcagattctgcacgtccatgccgcacaggcggtaggtgccggatgatgggcggtcgagcaggcccagcgtgttcatcagcgtggatttgccggaaccggatggtcccatgatggcgaggaactcgccttggcgcacgttcatggtgatgcctttgagcacatgggtgtaggtgtcgcctgtctcgaagatgcggttgatgttttcaacctcgatgacgttggctgtggcggtgggcacggcaatggtctcattacgccgtttgccgcgatttgcccggctcgcgtcggaacgaaacgggaacatatcagcgtgccctttcgtccgaagccgcggtttgcgaggtggaagaagcagcatcgccagtattgtcggcagccgaagcgccatcaagcatgatgacatcgcccttgctcacattgccttccacaacggctttggtgttgttcttggctttgaccgtgactcgcacccgcttgaactcatgggtttcggcgttggtctcgagcatgaccgcgctgctctccttaccctcatccacgatggcggcgagcggcaccatcaaagcgttgtcaatgctctgcatggtgattttcacactggccgtcatgcccggcttcagtttcggatcaggggcgggaatgatgagacgcacggcgtatcccacgccgccgttgccactctgcccgcctgccgaggaatcagccaactgcgacgtggtgctggcgatggtatccaccttggcatcgagcgtcagtcccggcaccgcggagaacgtgactttggcgctctggtccttggccactttagtgatatccagctcattgatgttgacattgaccttcatctgactcaggtcggcgatctgacacaatggtttaccgtctgcgccggcggaagtggatgagccatcggaggaagctccgatggcggcaccgggcaccgcgctcatggtcagcaccgtgcccgagaccggagcagtgactgtacgcttgttggcttgggcgaccgcctcgtcataggtggcttgtgcttgctgaacggcgacctgcgcgctctccacgccgctttgtgcagcgggcagctgtccggccgcatcatcggcagcggcttggccttcctcaccatcctgattacgtgcctgacctatggtcgcattgatttggttcacctgctgctgggcggcattaaggtttgagttcgctgctcgcagagccagatcagcctgattcacgtcgctatcgagcttgtcgttgttgatggtaaacagtacgtcgccggcgttgacggttgcgccttcctgcaccttgacttcgccgatggtgccgtcgatctgcggggtgacgacggtggagttgatgggttctatggaaccggtggagctgacttggtcgacgaaatggccacgttccaccgttgccgtggataccggagacacgcccccatctgacggggtaataatcgcgtgcaccaccataaagccgataatcagtaccgccacgacggcgacggcgatgatgcgatgcaccacgcgctttttcttgcgcgtctcacgttcgcgcattaatcggttgaattcggcgacttcctcgttctccgcctcgccttgggcaagggcgtcgacacttgattccacggtgtcggtagcgtccaacgattgtatgattgcggtctgctgctgatccttctgcatgtgctctcccccatggctggctccgagcctcgcgcccggatactggttccaagcctatggaggaatggcgtggtttccatcatgcgcaggattgaattgatggggagttgtcatccttaaggattagttggggtggggaatttatgggctgttttcagtcttggctctcgccttcgcttccgcttttctctcccccagtcatgcttcgcatgacagcctcctcgtcagagggggcttatgaataagcaaagggctcgggacgaatcccgagccctttggcgttagcgaactaacaacaccgtggaggtgttatcactcgttgtcgccagcggtagcggcggtagcggtgacggcacccttcttgtcggtgttcacgccggagtacacccagtcggtgtagtccgggtggtcgtagcccttgtcgacggcgaactggaaggcctcatcacggaacttctcgagctcgtcgatcttgtcggcgtacttgtcggcgtcgatcatgcgcagggcctcagcggtcagctcgtagcggtcgatgcggttgacacgaaccatgtcgtacggggtggtggtggagccctcctcctcgtagccgtggacgttgaagttgtcgtggttcggacggtcgtagatcaggccgcgcacgtcgtgagcgtaggagtggtacgcgaacagcaccggcttgtcggcggtgaagatgtcggcgaactcctcgtcggtcagagcctcgtcgttctccttggcggactgcagggagagcaggtcggcaacgttcacaaccttgaacttgacgcccagttccttcagcttgtcggaagcagccatgatctcctgagtcggaacatcgccggcggcggcaagcacgacctcggcctcatcgttgttcttggcggtggaagcccaatcccaagcggcggcacccttctcgagctcggcacgagcctcgtccagggtcagccaggtggcagcaggctgcttgccggcgatgatggcgttgatcttgttggtggacttgtagcacttctcggcgatggccagcagcatgttcgcatcggtggcgaagtagatgccgatgacgtggtcattgtggaagcacttgttcagcaggacggaggtgacacccgggtcctggtgggagaagccgttgtggtcctgacgccaaacgtgggaggagaccagcaggttcatggaggcgatcggcttgcgccacggaatctcgcggacggtagcctcaagccacttggcgtgctggttcagcatggagtcgatcacgtggacgaaggactcgtaggagctccagatgccgtgacgaccggtcagcaggtaggcctcgaggaagccttccatctggtgctcggacagctgctcaacgacctggccggagacgtgcatgtgctcgtcgacctcgtcggagatgtagccggcatcccactgcttgttggtgacttcgtaggaagcctgcagacggttggaagcggtctcatccggtccgaagatgcggaagtcgcgcgggttgttcttgatgatgtcgcgagtgtagacacccagacgacgggtggcctcgagctggccccagccgtggccgtactcagccacttccttgacctcgtagtcctcgaggttcggcagcttcaggtcgtcgcgaatcacaccaccgttggcgttcgggttggcaccgatacgcagctcacccttcggcatgaaggcaaggacgtcgtccttgacagcgccgttggcgtcgaacagctcttccggcttgtaggactcgagccagttcttgaggacctcgaagtgggcctcggtgtcgcgggcggaagccagcggcacctggtgagcgcgccaggagccctcggtcttcttgccgtcgatgtacttcgggcaggtccagcccttcggggtgcggaagatcagcatcgggtagaacggacggtgcacgttgtcggtctgagcggcggccttgatgtcgcagatctcgtcccagatggtctcccacagctcggcgaagcgacggtggatggacatgtggtcctcatcgtcgaagccagcgacgaactcgtagggctcgtaacccatgccgtggaagaactcgtggagctcttcgtcggagatgcgggacaggatggtcgggttggcgatcttgtagccgttgaggtgcaggatcggcagcacgataccgtcggtgcgcgggttcacgagcttgttggactgcca

SEQ ID NO: 2982 - DNA, 9116 bp, Unknown
  R19_24m  MAG No. k141_10915
acggacggaaagtcggattccggctcgtcttccgaccgcagccccgaactccagcaggcgttgaacgatgccgcccaagccatgaaggacagccagtccgccatgaagaacggcgactggaccgcctacggcaaggcgcagcaggagcttgaagacgccctcaacaaggccatcgagctcgacaagtaacttggcttccctcagggtgaggggagctatcgccgaaggcgactgaagggagtcggttacctcaactgacatagcccgtccttatcataaggacgggctatttgcgtattcaaaggaacttcatgccatacaccttccatccggccgtcgaatccgacatccaagccatcaccgacatctacaacgctgcggtggtggcgggtggggccaccgccgacctcaccccgcgcaccctcgaccaacgccgcgcctgggtcgaatcccatacgccgccctacggcgtttttgttgtggaatcggaagacggttcaatcatcggcttcggtgcgctctccgtgttctatgaccgcgcgggatatgacggtgtcaccgatttggcctattacatcgatccggcatggcaaggcaggggagtaggcacgttcatgcttgacaggctgctcaccgaggcgcgggcccgccacatgcgcaaggcctgtggcatcattttcgccgataacgtcggctccattgccctcatgcgccgcttcggcttcacccaattcggcctcatgcccgccgctgccaccgactccaccggcaccatgcgggacatgtcctactggtatttggacctgtaggcccgaggcggtttacccttgctctccatggattccggtgtcctataacactaaaaagttgtatcggatcagctcttttcctcgaacgccatatatcggacgcgcttatcccagataacggcaaactgcgggacggcacgcgattttcgtccgttttgacgtggcatcccgcaatcacgtgggatgccacacacgtcaaacgatgcacatagctcgcgtcccgcaactcttcctgcgaaatcattggaattctgccattcttatgattcggtgcaaataacgtgcgataacgcttgcgggatgccacgccaagaacgcccaaaatccgctgccgtcccgcaatatgtcatccgattgcagggaagcgtcatctgtctgagctgtttcccttgcttggcgtcgtaaacgacaagttgttgattgccgctgcatgtttctcctatttgagaaccgaatgctacatactgagatttttttccaaccggagttgatgttaaagtgacgccaagctgggacacgctgttcgtgtgcggcatcctgtgcaacgtgctcgtctgcctggccgtgcgcatcggattcgccgcgcgctccgtatccgacaaggtgctgggcatcctgctgccgatcgccggattcgtggcgatgggcttcgaacactgcgtggccaacatgttcttcctgccgatgggcctggtcgccaaaacgtttggtttcggcgccgacgcggcgggcgtcgcggcgctcgacgtgtcgggcatcctctataacctgtccgcagccacgctcggcaatatcctcggcggccctgttcgtggcgctggcctactggtgcctcaacggcaaacagcgcgaaaaggtcgctggcggcaccgcctaatagacgcgattcactcgtccccatctcttgtaatactggtattacaaggaggtgcgatatgactatggccatggtgacggcgcgcgtcaatgccgaacggaagcgcgacgcggagaaagtgcttaagcgtaatgggcgcacctattcggacctgattcgtgatctgaccgactaccttgcggatacggggaaactgccggaattcgagcgtctgacgctctccctgattcaggagcgggagcgtaggaaaaagcaggagttgattcaacgtttcgccgaccggaatttgccggaggcggaaggcgatctttcggatgaggagattctcgcgcaggcacgtatggaacgatttgggggacgggatgaaactgctgtttgacacgaatattctgctcgatttgtgcaatgacaaacgagcgcctttccataaacaatgtgttgatttgctcatggaagccgttgcacagccaaacattgagatcatggcgccggtatcgtcattgaatgacgtgtattgcgtgttgcgcaagcattatggcgaggagcgggcggcgcgagacgatatcggtggactgatggaattgttcgacatccgtccacttatggaacgccatgcgtgcatgtcgtaccggtccgatgagcccgacttcgaggacgggctcatccgtgccgttgccgaggacaatgacgccgacgtcatcgtgactcgtgacgtcgaagcgtttcaccattcatcggtccgatcgatggatgccgagcaatgccgtgccctgctgcttgccgattccaaggcttgacggcggcgttgagtacaatcttgacggttgaatccggccgggcatgggccagtgcgcgaggcgaacgcgcgcatgacgtacggaacgtacagaacgtgcatacgggaatataggaagacggacgaggagtggattatggcatcggatttctggctgattgcgggactgggcaaccccggcaaaaaatatgaggacacgcggcacaacatgggcttcatgaccgccgacgtgctcgccgaacgttggacggtgaacttcgccgaccacaaaggtctggccatgctcggtaaaagcgtgatgaacctggacggccgcaccgtcaagttctttctggccaagccgctgacttatatgaatgattccggcaatgcggtggcttccattagcgcctattaccagatcgagcccgaccatatcgtggtgattcacgatgacatggacttggaattcggtcgtatcaaggtcaaggcaggcggctccgcagggggccacaacggcatcaagtcgattgaccgttccctcggcacgccgaaatacgcgcgtgtgcgcatgggcgtcggtcactccaagcgcggtgcgaacgcgcatgacaacacggtgaactgggtgctgggcggattcggtccggaccagcgcaagcagctgcccgaattcctggctgacggcgccgacgccgccgaggacatcatcttccgcggtcttgccaagacccaggagaagttcaatggccggtgaggcgacgcacccggacctgatcaacggctcactggtaggcatcctgtctgagctggaacaggacaagaccttccttagactcgccactggtgacatcgaggtttcggacgacatcgacaattccgttctggccggtgtttccgaaggcttgcgcccggctttggccgccgccatcgggcagggtgtgaccggcaaacccggcaagccggtcgtgctggtcgtggcctccggccgcgaagccgaagagaccgtgggctcgctgcgctcctggtatgacggcgacccggacgacatcgcccagctcgaagcctgggaaaccctgccgcacgagcgtctgagcccgcgcgcggacaccgtggccagccgcatggccgtgttccgcagactcaagcatccgagcgataccgatccgatgttcggcccgattcgcattctcgtcatgccgatccgctcgctcatccagccggtcgtccaaggactgggcgacgtcgagccgctcgtgttcaccgtgggggaggacctgcccctcgacgaagccgccaaacgtctgatcgaaaacgcctacacgcgcgtggacctggtcatggaccgtggcgagttcgcggtgcgcggaggcatcctcgacgtgttcccgcccaccgcaccgcacccggtgcgtatcgaattcttcggcgacgaaattgacaccatcaaggaattccacgcctccgaccagcgtacctacggcgacggcctcaagaccatctgggccaccgcatgccgtgaactgcagctgaccgacgccgtgcgcgcccgcgccaaagccttggtcggttcgattcccaatgctgaggacatgctcgaatccatcgccaacgccattccggtcgaaggcatggaatccctgatgcccgcgctcgtggaccatctggaaccggtgggctccatgctgcccaagcacgccgtgatcctcctgagcgacccggagaaactgcgccgttccgccgaagacttggcaaaaaccgcgaacgagttcctggccgccagctggcatgtggccgcttccggccacggcgccggcgcgcccatcagcttcgacaaagccagcttcctcgactatgcggaaaccatcagctccctcgaatactccgaacatccggtgattcgcctcaccagtttcggcgtggacaccacgctgaccggccatgtgcagctcgacgcccagaacccggccgaattccgaggggatgaggccaaggcctcccaaggcatcgaaggcctgctcgacgccggcttccacgtcaccatcaccgccgctgcggccggcaccttggccaggctcaggcgcgcgatcaacactaccggcatcgccaatttcgacgtcatccgctctcaggccatcgacggcttcgtggacaaagccgccaaaatcgccctgctcaccgaacgcgacctgaccggccgcacttcggccgtggccgtggccaaaacgccgaaacgccggcgcaaggccatcgacttggtggaactcaaaaaaggcgattacgtggtgcacgagcagcacggcattggccggttcatcgaaatgcgccagcgcaccatcggcaccggcgccaacaaaaccactcgcgaatacctggtcatcgaatatgcgccttccaagcgcggcgccccggcggacaaactgttcatccccaccgaccagctcgaccaggtcagcaaatacatcggtgccgaagcccccaagctcaacaagctcggcggctccgactgggcggccaccaaggccaaggcccgcaaacacgtccacgagatcgccgacgacctgatcaagctgtactccgcccgccagcgcgccaggggcttcgccttcagcccggacaccccatggcagaaggaactggaagatgccttcccctatcaggaaaccgccgaccagctcaccaccatcgacgaggtcaaatccgacatggagaagcccgtgccgatggaccgcctcatctgcggcgacgtgggcttcggcaaaaccgaaatcgcactgcgtgccgccttcaaggccgtgcaggacggcaagcaggtggccgtgctcgtgcccaccacgctgcttgtccagcagcattacgagacgttcagcgaacgattcgagggtttcccggtcaatgtggcggccatgagccgattccagaccaccaaagagatcaacgagaccatcgagggtctggaaaccggcacggtggacgtggtcatcggcacgcacaagctgctgaacccgaaaatcaagttcaaggatctgggactcgtcatcatcgatgaggagcagcgtttcggcgtggaacacaaggagacgctgaaagccctgcgcaccaacgtggacgtgctgtccctgtctgccacgcctatcccgcgtacgctggagatggccgtgaccggcattcgcgagatgtccacgctggccaccccgcccgaagaccggttgccggtgctgacctatgtgggcgcctacgaggatgcgcaggccaccgcagccgtacgccgcgaactgctgcgaggcggccaggtgttctatgtccacaatcgtgtgcaggatatctcgtccatcgccgacaagatccacacgctggtgcccgaggcgcacgtcggcatcgcccacggcaagatgggggagaagcagctcgaccagatcatccgcgacttctggcatcgcgacatcgacgtgctcgtgtgcaccacgatcatcgagaccggtctcgatatctccaatgcgaacacgctgatcgtcgaccatgccgaccgtttcggcttgagccagctccatcagctgcgtggccgcgtcggtcgcggccgcgagcgcgcgtacgcttacttcctgtacgacccgtccaagccgatgaccgagcagtcccatgaccggctcgccaccatcgcgcagaacacggcgctcggctccggtttcgatgtggccatgaaggacttggaattgcgcggcaccggtaaccttctgggcgacgagcagtccggccatatcgagggcgtgggcttcgacctgtacgtacgcatggtgtccgaagccgtggagaagtacaaggagcccgaagagaacgtcgagccggtggccgtgtccatcgacctgcccatcgaagcgtcgattccgatcgagtacatcgattcggacaagctgcgtctggaagcgtaccgcaagctcgcctccgctcgcaacgaggccgatttgaaggatctggaagaggagcttaccgaccgttacggcaagccgccggtcgaattcgagaccctgttcgacgtggcccgtctgaagttcaaggcccgcaagctcggcatttcggagattctcgcgcaatccaaccgcgtgcgcatcggccgtatcgacccgcccgaatccatccagatgcgtatgggccgtatttacaaaggcgcccaataccgcccggtcacccaccagctcatcgtacccaccccgttcaccggttccctgggccaaggccccatgagctccgaccaggtagtcctctggactaaccaactcctcgatgacttggcatggaggccacaacgatgaaaaaccaacacgcggcaacacttgccggctatgagattccccgcctcggcatgggcacaatggcgctcgccatcgaggggcgcccctccaaccgtgatcaggcgatcgagaccatccatgccgcgctcgatgccggagtccgttatttggacacggcttggtcctattatctgcccagcgcacccggcaccggcgaaccggaggatatgggctatggcgaatatctggtccgcgatgctctgcactcgtggcatggccccaaagatcaggtgctcgtagccaccaaaaccggctggctgcgcacgcttgacggcaacggcaactacggctggcaggccgacgcccgacccgaaaccatgatcgccaatgccaaggaatcagcccgccgcctcggtgtcgatacgctcgatctgctctactcgcactgcaatgatccgcaggtgtcgtacgaagaccagatgggcgcactcaagcagctcgtggacgaaggtgtggccaaagcggtcggtatctccagaatcgacaacgcggacatcgaagccgcccacaacattttgggcgatcgtctcgtggccgtccagaaccagttctccccggttcaccgcgaccccgaacacacgttggagacctgcgaaaaactcggtttggctttcgtctgctggtcgccgctcggtggattccttgacccgttcaacgagcatctgttcgaccggttccgcgaagtcgcgaagtcccacgactgctcctaccagcgcgtcacgctcgcgtgggaacttgcgcaataccaatatctgttcacgattccctcggccagaaacccgcaggagattcaggactcgttcaaagccggcgaactgaaattgtccgacagtgaaatcgactacctcaatggcaaggacgtcgactgagcgatttcgtccgtactgccttgcaatcaggcggcgcatcggcattgtgagcgctaacactaaattttgggcgtgttgttcacaacgtccacaaatcgcactactcttaagaatgtcattcaagatacacaaccgttttaaggagtagttgtggcagtaattgaaagcgtgtacgcgcgtcagattctggattcccgtggcaacccgaccgttgaggtctacctggagaccgaagacggcgctcagggcaagggtctggttccgtccggcgcctccaccggtgaagctgaggcttgggagcgtcgcgatggcgacaagtccgtctacggcggcaagggcgttcttaacgcggtcaaggccgtgaacgaggtcatcgctccgaaggtcatcggcatggacgctgctgaccagcgcgctctggacgacctgatgatcgagctcgacggcaccccgaacaagggcaagctgggcgccaacgccatcctgggtgtctccctggctgctctgtacgcttccgccgagtccgccggcctgccgctgtaccgctacatcggcggcaccaacggccacatcctgccggtcccgaacatgaacatcatgaacggtggcgctcacgctgacttcgccaccgacattcaggagtacatgatctccccgtacggcttcgacacctactccgaggctctgcgcgctggcgttgaggtttaccacaccctgaagaacgttctgaagaaggaaggcctgaacaccggcctcggcgacgagggtggcttcgccccgaagatgaagtccaacgaggactccctcaagtacatcatggacgccatctccgccgccggctacgagcctggcaagcagatcggcatctgcctggatgtcgcctcctccgagttctacaacaaggagaccggcaagtaccgcttcgacggtgaagagcgcgactccgcctacatgctcgactactacgagaacctcatcaacgagtacccgatcgtctccatcgaggacccgttcaatgaggaaggctgggaagactgggctgccatcaccgctcgcctcggcgatcgtctgcagttcgtcggcgacgacctgctggtcaccaacccggctcgtctgcagaaggccatcgacctcggcgccgccaactccctgctggtcaagctgaaccagatcggttccgtcaccgagaccctcgacgccatcgagctggccaccgccaacggctacacctccatggtttcccaccgctccggcgagaccccggacaccaccatctccgacctggctgttgctaagaacacccgccagatcaagaccggtgccccggcccgtggcgagcgcgttgccaagtacaaccgcctgctcgagatcgaggaggagctcggctccaccgctcagtacgccggctacagcgccttcaaggcctgcaagaagtac

SEQ ID NO: 2983 - DNA, 39187 bp, Unknown
  R19_24m  MAG No. k141_11164
accacggacgcctcatcgaattcaccggccccagccgacgcgtcagccaagccctcatgttcggcaagacggacaaccagtaaaacaaaccaccggccggcactcctcatgccgaaaaccgaaaaaaattagtgacgaaacacgaaacaccgacttgactaaaaacaatgcctgtttcgcaagcggaattttcggttatggctgaggcttggtgggcttcacggcacccgtgggtatgaatatgccccgccggagaaaagagtaaagccggcgggcgaaggaaagtcttggaaggttgccttggcgttccttgcattgaacggcaacactatcatttttgtttatggtcaaataaacgtgtacggcgttaccaccaaatctgaacggcgtaagcgttcatattggacacggatggcggatggaaatggcatcggcggaagaaaagcgccggtgccgtacggttcctgatagattcccgagtgctaacaaccaacacatggtcctcgggaggaaaggaatgacgacaccggtgcgtattcaacagagtatcaggcagttcgagacgaacggcctgacgcatacgcagatagccagggaactgggcgtttcgcggacgaccgtggtcaagtacgcgacccgcgattattcgcccgttccgccgaccgggggaactgcgagccgttccctggtcgcgggcgagtacgcgcgcaaggccgacgaatggctcgaggccgaccggtgcatgccgcgcaaacagcggcacaccgcccggcgcgtgcacgagcggctcgtggagtgtgttttgtcaagcgctggtgtgccgttttaccgtgggtggctgtccgggttaccggtcaattgtttaccgggttaccgtcggctggtttcgtctggttttggttgttttgttattgcatgagggcgtgggtccgtctgtaggattcgccctcgaacctgatcatgcgtccgtggtggacggtgcggtcgatgatcgcggcggccatgttcgggtcgccgaacacgcgtccccatccgccggactcgatgttcgtggtgtagacgatgctctgggtctcgtacgcgttggtgacaacctggaacaggagtctgctgccctcctcgtcgatgggcacgtagccgagctcgtcgatgacgatcatgcgggccttggcgatggcttgcagttcccggtcgagtttgccttccgtgttggcgcgcagaagcctcatgaccaggcccgcggcggtgtggaaccgcaccggcacgccctgccggcaggccttcctgcccaacgcgatggcgaggtgggtcttgccggcgccggcaggcccgaacatgaccacgtcctccggaccgtcgaggaatccgagggattcgagcccgctgcgctgccagtccgccggcatgcgcacgttctgccagtcgtagtcgtcgagttccctggcggcggggaagccggcctgtccgggcaggcgcgtgcgtttggacgcctccctgtattcgatctcggcgttcatccaccggtccacgaactccatccgggccggggtcgcggtttcgagctggtcggcgagcacctgcctggtcaatggcagccggcgggccagacgcatgatctcgtccattttcctgttcgtggacgcgcggcggcgggtcgcgtccggcatcgtcgtgttccttttgcccatgctcatgccgccttcgcccgggtttcggggcgcatgaacctgtcatacgcgtgcaggtccggtgccgggacgccgtccgaggtttcgcctgcgctgacgcgtctggccatggccgtcaggcttgcctcgtcgaccgagtggccctgctccacgatgtgcccgccggcctttgccgcggcatcgaagccgtatgcgtcgccggccttggccaggaggcggaacgcgcgctggcgggtcttggagtccatggcgtcgatcgcgagacggagcttttcggggaaatcgccgcggatgggggattcgccccacgcgcgcgccttgcgcgccaaagcgggcagcaggcccgccgggttcctcaccgtccgggcggccctgccgtacgcgcgcggcagctcggccacgaaccggccgtcctgggtgcggatctccacctggaacgcgcgcaaaccgacctccagggtccagccatgccacgagggtccggcgaggcagcggtcggaatcgatctcgacgttgccctcccggtcggccctgcgcgtcacccaacggcacgcgtcgtacgagacccggggcaacggcagcatgcgcgtcttctccccggcgaacaggtccgagatcggaacatccttgcggtaatgcgtgttcccggcgatctcgtcgcagcgcgagagcatccaggaggtgagtttccggtacgattccgcgttgggcatggggaccatgaggttgcgcctgaggaacccgaccgcgttctccacgctgcccttctcccacccgctggccgggttgcagaacctgacctcgacccggtaatgctcgacgaaccgtcggaacacgtccacgatggtgattctgtcccacgcgacccggtgcgcggcgccggtggcgttgtcgaacaccagcacgcgcggcgccaggccgatatgcccgaacacggtctccaaaccctcgcacacgcattcggcgttctccccgggcagcgcgaccacccagcgcatgttcgaatacgggaacgccaccaccaggcaacgcaccttcacccgagctcccctgatgcaggccaggccttcgccgaaatcgacctgcgcgatgcccgtctctcatcgcagttccatgaaaccgtcgcccggatccccccaatcccgcttccgctgccgcacataacgccgcacgagctggtacgagccctcgtagccatgctcgtcccgcagccggtgccagactcgcatcgcggtatggcgccgcttgcgcggcatcaaccggtccgactccaaccacttgtcgatcaccggcctgaacgggtccagcttcgacttctccttcgcgtgttcgggcggcttgggcgagcaatcctccaattcggcgtacttcccggccgtctgccttgacactccgacctccctggccatccgacgccaggaaacaccctgcgcgtcgagaatcctgatatgttgctgcacggacgtcgacaccgtcatattcctttcctcccctgggaaaacaccaccaaccccgggaatccaatagggacgaaacgggccgacgcccttttgcgccaagggacgataaaacggtcaacttcttgccggtaacccggccaacaccatcgcggtaactcggctcacatcacattgaacacaaacacgcaagcgtttgtcgcccctcggtgaggtggtggatatggcgcacgccgcgcatttccaccgctggctgccggccttggttctcccgttcttcctcatcgcctcgccgcatatcgggcacaggcgcgccctccttgacttcgaccgcatgccaccatgcaaccgcgaggccagccgcgggacccgttttaatgaacctctccattaaaaccagtacaacacgcctaccgcagcaacgcctcccgacggatttaaacaccacgtttagttcctataagccggatattgatgggttgaatgaattattttgcgttcggaatatttcactcgtttcgtaatatgtgccgctcgggaaaccgggcggcatctgtgtttcgtttcgcggttgtcgtgtccccccccccctgatagtttgccgctgtaggaaggattcgattatggattatcgtcgtttcacggcgcttgtcgcgtgtgctggtttggttgtgtctgtgtctgcttgcaggcaggtggattcatcgtctgattcggctggcggttcgcagtcgtcgcagtcggcggattcggattcgaaggatgatgcttcgaaggattcgggcaaggacgtttcgaaggatgatgagcagtcgcaggattcaagcgatgatgcttcgtctgattcggatgaatcgaaggatgatgatgagcagtcggatgcggttgctgattgcgttccgtttgataagctgccgttctcggttgatactccgttcgggtcgagcgaggatgttgtttcgtgcgcggtggagcagtcctcggatgatgcggtgaaggtgccgctatccaaggatgggaaggatgtcggctatctggagatgtcggtcgacatggataagtcggcgggcgttttcaatgtgacggttgatggttctggcatgtctgatgatgcggagcaggtgtatacgatgttcgtctttgctgatgaggtgaatcgcgctcctacgatttcgagtgaggatggttctctctcgattgaacgtggcgggcatgttaactggaagtcgaagtctggttatgcggttccgggttatgtgattgtggaggtgaatgagggcgttcagaatgctctgctgttccgtaagttgtgattgattgcatgtggatattgcggtcattgtagtcattgttttcaagaaggatttgattatgaagttaaataaggtttttgctgggattctcgctgctggtttggttgtgagcatggctgcatgtggtagcagctctggtagcagctcgaatgcaggcggtattttcggaggcggttgcaagaaggacgtgccggagaatatcgtatctgctgtcggtacaccggaaaagggcgtggatccggttgaatgtgcatatgaggattcaggaaagcttcttgatggcaaacttgaggtgaagtttgataatactccgttatatattgccgactatgaaggtttcaaggctcttgataagtctggttcaatggacggggctgaaaagtatctttctgaagatccggctgatgtagatcctcattatcttgaaagcaacaatcaggtatattgggttcagaaggtttctttgaagaatctttctgatgatactattgatttgggatcagatattgatacgattagagcagtccctgatggacttgatcttccggctggtcgtgcatatagcgctgatctgtattacggtgatgatgacttgaatgcaggtgattcgaggactgcttatattgccttctatgcatggatatctgagggagatacggattatccggatgtaacgtgggtcattcatgataattatgagaagcagtcaaatggagcttattatgtttcgaagcctgagaaggtcgtgtattcatcttcgactttcaaatatgtccagtgagatattcaggttgcgtctcataagagtttcaaattagtggcagtcctcggggtggttcatctcggggactgttttcagtgtgctcattgtgcacagtgatattcattggttgtctgcatgaggttttacatgatttactcatgtggactccgttgtcatcgtggttgatatgttgttgattgttataatcctcggggtctcggctctgaggattattgttatctgctgatattggtggcctataggaactaaacgtggtgttttaagattcgttttcacgtggtttagcgaacatgtcccttgcggatgtagaagccgggttcgttggtcgggtcgtcgtggttgttggcctggataccggtgtcgtagccgccttcgcgtccggcgtcgttcccgtcgcgttgccgttcgccgtcggcttgcccgaacgcggtcgcgatgagtccgtccggctccggggccgggcttttcatgtagcagcgccattcgcacgcgcgccgcatgtgcccctcgggaagcccgtggtgctccaggagcgtgcgctttatcagcgagttggccccaccctccaacaggttcgtggtgcgggccaccggtccgcccgccagcagcccgggctccaggaaggcgaacggttcgtcctcgcggaacatcctctccagacgccggtaacagcggtgcagctcctcgtgcgtccaccgccactgccgtccggaggccttggggttggcgggatcgtccttggcgtacgtgcgttcggcgatgaatgccttccaccgctcgtgccacgcgttgagggcctcgccccatctgatcgggtcgaacgtggtggagggcagcggcatcagcgccgcgcggtcctccccgaacacgtccccgatggcggcgcccctgcggtaatgcctcgacgaggcggccagcgcgtcgcatctgtcgagcatgatccgtccgagctgcgtatgggtctcggcctccagcggcgggaccatgaggttgcggcggaggaacccgaccgcgttctccaccgcgcctttctcccaaccggaataggggttgcagaacctcgcgtcgatgcggtggtgcgcgaggaacgcgtcgaacaccgcggtgagcgtcacctcgcccctcgcgttcctgcgtcccgcaccggtggcgttgtccatgacgatcactggcaggactccgccgatgtgcttgaacacctcgaccagcccgtggcacaggcattccgcgttcttcccgggcaggctcgccgcgtagcgcatgttcgaatgggggaacgtgatgaccaggcagtggtcgtccacgagctcgccggcgatgcgggccttcgccacgccgaaatcgatctgcgcgacgccgggcgtccagacgagctcgccgtatccgtcggaaccgctccggttcgcctcgcgccagcgtctcacgtaccccggcgttgtcgtgtactcgccgtcgtactcggtctccgcgcggagcctgtcgtgcacgcgtctggcggtgtggcgctgcttgcggggcagcatgcggtcggcctcgagccatccgtcgaccaacgccgcgtacgggtcgatcttggagccgcggcgcctgtccgtgggcggtttcggcgtcatgtcgtccatatcggcgtatttcgcgacagtggcgcggtccacgtccggcctcctcgcgatctccgacctggacactccctgacggtccagcctcctgatatcttgccgtttgggcatcggtatcgccatcgtcctttccttcccgagcgccgccggctgcaaccggcggattcgtttttgggttgcgtctcgggaatatacaggcacggcgggctggtgcctgttttcgtctgggcggtcatatggtgcagttcctgctggaaaccagcagcctatgctgcggaaaaatagtgcagaaattgcttaagaaaaattgaagcaaaacacgttcgtggggcgagagtcccatacgctccgatttcccggaggagatgcgcgtgctgctcgaccggatggagccgcgcgaacgcggactgctggtcgatgacatccgccgcgcggccgtggcgagtggcttccgtgcggccgccatggccgtcgccgagatcgtcgccgcgggcagaaggcccgacagggccgcgatcgaccagacggccaggcggatcgcgcagggcgacggtcccgaatcgagggccaggctcgacacgtacagcaggttcataagggaggacggcgatgagtgagtcgacggacgccgcggcgggcggacgcaggggcgggcggaccgtgagcaagtccaccccggacgaggtcatggggctcgcatgcggcctgccgttgactaggagcgtgctgcgttccgtggtcgcggacgccacacccggccagctcggcgtgctggccgacctgttcagggccgagaacgccagccggacggaatccagacgcgccagactgattaggaacgcgggcttcccgtgcgtcaagggcttcgacggatacgactggggcatggcgtcgttccccgccgactggggcgcgagcaactcatggacctcggtttcgtggaccgggccgaggacctcgtgctctacggcgacgttggatgcggcaagacgcacatggcgatcgccacgggcatgctggcgtgcgagaggggcatgccggtgaggttcttcaccgcgtcgtcgctggtgatgcgtttgcggcgggcgagggacgagaaccggctcgacgcggaactgcgcgcgataggccgcgccaggctgctggtcatcgacgagctgggctatctgccgatcgacatcgacggggccaggctcctgtttcaggtcgtcgcggattcctacgagaagcggagcgtggtgttcaccacgaacctggagttcggacggtggggcgaggtgttcggagacggcgacatggccgccgcggtcatcgaccgcatcgtgcaccacggaaggatcgtcaggttccgtggcgagtcgtaccgcaacagccactccctgatgagataaatggaaagaggggaaccggccgggccgccggtgacggtgtccattttgaacgccgatggtgttcagattaactggtaacgacacgcagatttatttgacgaaagacaattttcgccgcgttgcacttcccgtgcaagttccacagggccttgcggctactagatattcgacatggcgggatccgttaccggaggtaacatccgtcccggtcaatctgttacggacaagaatcgttgccggagccggattcatcgtcccttatatacctccgtaacgggtgtaacggtctacgaaaaatgagttggaactgtagtggataaacatgtgtcgttacacctgttacatctgtatacagctttggaagaagcaacgctccataaatgatgaagagaaaccagtccagccttagaggagcgttaaggctcccggtccaaagattggtattgtcagtcctgtgaaatagctattgtttggctacgtcaacaggagtgagctatgaatgatttctttacatcccgcatcgggcttgaaaataatagtcaactgaaacctcgtattgtgctgaaatatgaattcaggatccatttaattggcccagatctcagtgtggccagtgcacgcagagaaccgctcttgactaagaagagccagcgatttgttgatgttctcgttctttcttgtacgcgagaacaacagttcaaaagactcttccgaatggacagagacgtgaaaatgagagtgcgttctcgggtaacgaagctcgaagatggctctctcattgagaccattgctgggtcgatatttgcttatggctggcagggtattcaagtgatggctgcgcttgatggagctgggcattttcttaaattcttgcaatccgagtatcggaatctcgagaaagattatcaaagtaggcatatgccaccaagacattccagcttagagtggaaaagcaataatctttttgcttacctgcggagcaagggtgaaatggaggtggatgtgaaggtatgggatcctcgtaggtccaaggataagctggatggttcgctgcgataaattgaaatcagtcactgatcctgacagccctgctatatgggtgacaggagatcttggcacaaggctgtggctatccaaatggttgatttacaggcaatgcggctaagctacagtgtcatactctgctgaacctacactatcgtcccgcttatctttggtgatggcgttgattcgtgcttggtccacggcgtcggcgacttcgttgagtcgttcgggccagagtccggcgtacacgtcgagcgtgatgcttgcggtggcgtggccgagttgtttctgcagggtcttgacatccgcgccgcaggcgatggcgatggacgcataggtgtggcggaggctgtggatgttcacgccttcgccttccatgccggcgttgcgcacgctgggataccagatgcgggttcgccagctgtggtcgtggatgtatcctccgcgcttggcccggaacaggaactcgttcttgctttgcccggcggcctgttcctccagttggggaatgagcgatggcggtagggcgatggtccgtgcctcgccgcttttgggtgtgccgagttgcatcttgccttcgccgtcgtcggaccatgtgcggcgtatgcgggccttgcggttcctgaagtcgagattctggatctgcagggcgagggcttcgttgatgcgcacgcccgtgtaggcgaggaagcgcaccaacagtccgtcaacgtcgcgtcccttggcggcagcttcgtcggcgagcagttcgacctccggcacggtgaggaacaccatgtcttcgtccttggacacgatccggggcgtggtgaccagtttggccgggttttcgcggatccacttgttggtgatggcatactcgaacaccgccgccatgacgaccttgacgatgttacggatgctgcggggactcagcggccgtggcttcctcttgccgggcagctcggccttgtatccgcccttggagagtttgttcacccatgattggagttcgttgggcgtgatttcgcgcagcgtcttgccgccccatgtggggttgatgtacacgcgcagcttgcgctggtagcggccgagggtggcgggcttgacgtcgagcttggtttcgatccactggctggctacatcccggaagagccgctggtcggcgttgggatccacgtagcggccgcgccggatgtcgtcttcgagggctgcctggaattcctcggcatcatagagtttgtcgaacgccttggtcttgctttgcttggtgccgtcgggattgatgacgaaccagcggcagcgccagcgcttgccgatgccatagcggggcgtgcgccattttccagggactttcgccttcattgggtcgcgtgcgttggcgagactacgtttgaccgtggcggtaggagggttgccgtcgtcgccgtccttgagccataggtcgtcgatgttcactcgtgccatgacggtcgctcctttctatcgctggatcattctgtatggttcggccatgccttcgaggattgctcggtagtccctgacgagacctacggtgactccgagctcgtctgcgatcctgtaggggcaagcatcgtaggtttcctcggcggtcgcatattcattggggtctatgagacggagggcggtttcacgccgggtcttctgctcttcgacatcgtggctcagcagttgggcgatgccgtcgcgccagtgctcggcgtggattatctcgtgttgcagggccacccgcttctggttgtcggtcagatgctcgtcgagggtgatcctgcgcgtgttgtgttggtagcttcctagtctgtcgtcgttgatggtggtttcgactacctgcagacccatagtttgggcgatgcagagtaagtcgtgataactgttcaaccggttcccttctcactgcatgctggttgtcagtcgatcggagtgttcatttcctgttgcttgttgtagtcggtgtacgcggcggtgtcgtagtcgtcctgcatcgtgtgtccggtgaccttggcgagctgcgtcgccgcgctgaggaacgggctcgatgcgggaacatcggccggagccgtgactggagcggtggtttcgggcttgcgttcggtggcgtacaggatggtgcgatggctgatcgaccacggctacgtgaacgaacccgacagcgaagcttccactcccaagccggagcacatggcgcggatcccgtcattgagcgaactgatgcgacagcccatcacggtcggatccatagcgaacgggaaacccgacatgacgccgataccggccggaagccggaacaacgaccttcacgcgtgggcctacggaagactgctgaaccaccccgacaatgccgaggccattcgccgtgatctgttcgagcgcggacagaccagcggactgaaggaatctgagttggagacgatctggcagtccatccgccgccagctgggaggcgaccgatgatgccgagacggaaaccaccgtggctcaaactcctgtgcccgtcgggcgcgaaccccgcgcacctgacagccagacgctgcggcacatgccgtgaatgggtggcggtggacaccggcgggccgatcgaagaggtctacgaccccggcgtgctggacgcaacggatctggccacggccatcatcctgggccgcaggttcacgcgcatccagcccatcgccggcaccacgctgatcgaactgcgcaccccatgcggcacgcggggcatcaaacctgacggcatgtacctcgcagcccacgagtgcttccgcacgccgatcagcgtgaagccattcaaaccacccaaacgcacggcagcgtccaaatggaacggaccgcaactcagcaaaggggagataagcgctttcgagacagcctagaggaataaaccatgaccatcacacaccaaccacaaccaccaagcatccacacgcatcggctcgccaaactcgtgccggcggtactggccacgctgcgcacaccggccctcacggtcgggttcggcaccgccgccggatacatgcgcgtctgccaatgcggatacgccacacgcgaccccaaccggttcgccaaccatctggaacacaagatcggagaaaccatcatgagcaacccactggcattccttgacgaccccacacccaccatcaggcacaggctcgtggacaccgcgaagcacgggcggatctacgtctgctcgtgcggccgcaactacccgtcgctcaccgccatgcaggaacacatccgcgccatgaacgaaagacacgacgatgacaaccacgagtgaaccgcatctggtcatcaccgaatctaccggccacggactgcgctggtggtgctcgtgcggatatgacaccgacagcctgcaagacctaagacaacacttgaacggagggaacgacgatgacagggccatgcgtgaacaatgacggagccagcactgttgctggaaggctgctgtgcaaggagtgcgagcgacggctcatggaagccctcgccatgataggtgaggatgccatgccgctgctgttggtcgccaccaaacgggccagcgtcagcatacagggcaacaggcattccacgccggcgcaggcaccgtcgccgttgcgtgacggcatgtgggaactgtactgcgagacggaacagctactgcgacaactgggtttgcgtttcgactacgcgaaggccgtggacccgcgcgccactgtgaaggcgctggcgaacgccgcgatcatggatccagttcccttgctgtcgagcggggacgtgctcgcctggtatcaggacatcaccaatcttgcccgacggatccacacggcggtcaaccccgccaagccgcgtatagcgttcggcgcttgccccagttgtggaagcgtggtgtggggcgatcccgacgaacggtacggcgaatgcgctggatgcggcaacaaggtgaaccgtcgtgccgtcgccgaccgtctgcttgccaaactggtcgtcagcgaagtacgaggtacagccaagcaactgagtgctgaatgcgcgaaagcggggatccgtctgccggccaacactatccgctcatgggtgaaaagagggcaattgcattatggcaatgatgggaaactcggcttaagtgaactagtgccgttgcttgataggcgacgggcataggcatgcggtgagtaatgttgcttgcgcagtatcactcaccgcatttacttattcgcctttatgtgacggggcttccagcattgctcggtagggttctagactcaatgccgttcgtaaggcatcgctgcgtaggggcacaaatttgccatcactggtcatcttccctaaaagcgcagaccaagcgtcgaatttctcctgcttctcaagaagcggaatgttccgttccaaggccttgttgataagatctgtcacgttctgcgttgtcagcttttccatggtctgacgcaactccagtttcgtcttttcatcgaaagcggattcttgaatgttggccgaggaaagttcacgaatatcctttgcgagatccattgccttgtacatgatgataagcaaacgattttgtgcctcctcgctgtccatgtgcaactggcatgcttcaatcgcgtcatcgacttccttggagaatgcgtttgtcgtttcaggagcggaagtcagtaatgcaatcggctgaggcgtttcgacatcattcttttttgaacgacgagtcactttgttccaaagtttacccatcgtaggtttaactgaatcctcccaccaatgaacgacggttttatcccaccagcttctgaatgtctcattgttcgctagatagtatgcggttccgactattgcggcaatcgcaattgcggcggcagccatagccgctgcaggtgtgtctccgtcatcgttgccgatttctgcgccgtctccgtcgtcggtattgtcgaagacgggttcccaacgtgcttgtcctttcaaatggttttcatcatcgaagaaggctcccagatagacgctgggatcgtcttgaggattggccaaatgcatcccgtcaggcattatcaggcggtacagcggctcgtcttccatatcgactccttaaatccttacgcttcgacgtcgaaagcgcatgaatcacttgtttaacaagtataaggtggaaagatttgcgtcggtagactcagtaaaacccagtaaaactttttcagcctccgaaacggcctttcaagcaaaagaaaaagccttaattcccaagcgggagtagggctttcgtggtcgggccggcgggatttgaacccgcgacatcttgctcccaaagcaagcgcgctaccaaactgcgctacggcccggtaattatgtcacttggcataacttttttagtctacacatacctcaagacggtctgtgcctccagatgactcatttttgacactcagataggccgagaaaatcggaggtctgcggtcattgttactgagtgttactggcggtcatttttcagttttagttgaagtcctaaaacccaagcgggagtaaggcttatcgggtgtcgcaagcgcaacgctttgggaacatcctgctcccaaagcaggcgcgctaccaaactgcgctatagcccgatgcgccattaaggcacaatgaatcattgtaaacgacgctggatacattgcgtgtcgagcatatgaattcaaaaaaggttctggattctcttgatagcttatgagtgacatctttattcattgatgctctacaacgactaggtttggatctgcatcgatatctggcgcatccgctggactaacaaggaccgtgcaaacgatgtggcccccgacttcctgcgaggaagtcgggggccacatcgattgcacggtggactatcggatcaattctgatcagatcagctcgaggtcgacatcgaggctgatcggcttgtccgccgggatatggtactgggggtgcaccggcgacatccaggaatcatcgccgccaacgcccatctgtgcggcaaggacgcgcaggaacatgtgcttcggcttcggcagctcgtcctggtgctgagcctcctcaagcatgaagctggagtacggcaacaggcttaccgcgaacggcgcggcaccatcggcgcggctgacgcgcatgccgtggccgtgatcgtcggtaatctcggcccaacgcacatcctcatggttgcccgtctcctgcggcatgaggtacggcgcatgatcggcgaaggcgttggtgctccacacgccgagcttggcgtgcttgcggtccaggtacgtctcctccgggccggtgccgaagaacctcaggttcgtgtactgcacaggcagcgtccattcgatgccgaacgccgggatggtgggcaggtcaccctgctctccagggtattcgacgtgcaggttcacgcggccatcggtgtgggccgtgtaggagacggtcaccttggtgcgctgcgcggtggcgagctcatacgtgtacgtgcccttgagcgtgctgtcgtcgatctgctcgagcacgttgtccacgcagcgggcgtagcggccggcgcccagccactggacgcgctcgaagccatgaccggcaccgcgatcgttgtcggtcagcggacggaaggtggtgattgcgggacggcgcagcacgaactcgttgccggcgaaggtgtaggagaccatgccgccctgggtgcgcgacagcaggacctcgcgtccggcgcctcgcacgccagcgttccaacggcccacggtgatggtcccatcggccggcttcgcgtcgggcgtcgcggtggcgtccgcgggcaccaccgcctgtccgaaggcaagctcgtagccgctctcggcccaatcggtcgccttggcgagacgctgcgaaacctgcagcaccagttcgcgggcgtcggcgcggtacgccgccaccggccatgcgacatcgaacgtgcgggtctcaccggccggcacgtcgaaacgccgggtggactgccagaccggcttgccgtcggcgagaacgctcaggacgaacacgtagtcgccggtggcggtgaacaggttgtcgttcttgacggacaccgagtccttcgtcacgtcgatgtggacgttcgagtacagctgcttgacttcctgggccttgggggacggcttgcggtcggcgaacagcaggccgtcgccggagaactcgtagtcggacggacggtcgccgaagtctccgccgtagcgcaggctcctggtgccgtcgggctgggtggcgtagatggcctggtcgatgaagtcccagatgaagccgccctgatacttcgggtagcgttcgagcgccgtgtattcgtccatgttgcccacggagttgcccatggcgtgcatgtattcgcaggagaggtacggcttcttcgggtcgtccttcaggtacttctcgatctcgtcggcatgcgagtacatacgggtctcgatgtcggtgacgtcatcgtagtcacggttgtgggtcacgccctcgtagtgcaccggacggttcgggtcgatgtcgtgcacgtgcttgtacatggcgcggaacacgtcgcccacgtaggattcgttgcccagcgaccagatcagcacgctcgggtggttgtagtcacggcgcatcatgctgttgacgcggtcgacgcaggcgccttcccattcgcgcttgctgcccggcacgatggtgtcctcggtgaggacgtctccgggcagggaccagctgccgtgggcttcgaggttggcttcgtcgatcaggtagatgccgtactcgtcgcacagttcgtaccagcgttcctggttcgggtagtgcgaggtgcggatggagttgatgttgtggcgcttgcagaagaccacgtcatcgatcatgtcctgctcggtgatggcgcggccgcgttcggcgtcgaactcgtggcggtcggcgcccttgaacacgatgcgcttgccgttgatggtcaggatgccgtcctcgatgcggaagcggcggaaaccgaccttctgggacgtgcattcgatgacgtctcccgcttggtcgatgacgtcgacgtcaagttcgtacagcgtcgggctttcggcgctccagggttcgatgccctgcagcggctcgctggagatcgcggtctgcgcctccgcgtcgcccgtcgtctgccacaccgtgttgccgtcggcgtccttcagggtcgcgcggaccgtggccgcgtcggccgcgttgagcacggtcagcgcggcgtcgagggaagcggtgccggcctcgggatcccaatcggcttcgatttgcgtgttctcgatgtgcacgtgcgggcgggcggcgagttcgacggagcggaacaggccgtgcagacgccagaagtcctgatcctcaagccaggaggcgctggagtattcgtagcaggcgacggccacgacgttctccccgtcgtgcagcagttcggtgatgtcgaactcattgggcgtgaagccgtcctcgccatagccgacgaacgcgccgttgacccacacgtagatcgccgtggccatgccgtggaacacgatcgacaccgatccgccggcctgcttggcgtttgctacgggggcggagacggtgaacttcctgcggtagagcgcgacgtgattgttctccgggatgttcggttccaacgggttctcgtggccgtcccacggatactggacgttcacgtacttgtggttcatcagaccggccgtctgcaggtggcccggaacctggatacgctcgaacgaggagtcgtcgaacgactcggccgtcgcgggttcctcttcgaggttgatgtcggcggcctgaacgacctcgacccgccactcgccgtcaaggctctgcttgagatcggaccattgtccgctctgggggtcgcgggcgtaccacttgtggctggaatgggccggagtccggttcacctcgaacaccgtcgggtcggtcagccaagcctgcgatgcgcgatcgacatgtgtgacgtctgtcatgctctcctgctttctgtcattacctcgttgtgaatgatattatggaggaggtcggggcctcctttaccgaaaaggataaacagtttttatataaaacgcaaatcctgtttaccgcttccaaatcactggcactgcttgccgtcgacgctacgccgcgtccatgcaatgtctcggttcagcccatgttatcccatccttgcgacacgctgtttatctccttgtttactaatgctttttacttttggtgataaaacttgtatgcttactttacaaaatcaatgagtgattccatgctctgggttcttaaggagaagattaatgagcaacgaaaatgccgcggacggtgacgtccgcaggaagagtgggttaggccagcgcatcgcctacgcgttcggcaacctcggtcaggccgccttctacaacgcgatgagcacgtacttcatcgtgtatgtcaccagctgcctgttctcgggcgttgacaaggcgcttgcggccaagctgatcggcgtcatcaccagcctcgtggtgatcatccgcatcgccgagatcttcgtcgatccgctgctgggcaacctcgtggacaacaccaccaccaagtggggccgtttccgcccgtggcagttcttcggcggactggtctcctccgtgctgcttgccgtggttttcagcggcatgtttggcctggtgaacgttaactccacattgttcatcgtcgtgttcgtcatcacgttcatcgtgcttgacgtgttctactccctgcgcgacatctcctactggggcatgatcccggcgttgtcctccgactcccacgagcgttccacctacactgccctcggctccttcaccggctccatcggcggcaacgccatcaccatcctcgtgattccggtcgtcacctatttcagctgggtgttcaccggcgagaacgccgagcaccagtcgggttggaccgctttcggcatcatcgtcgcggtgctcggcatcatgaccgcctggaccgtcgccttcggcaccagggaaaaccaaagcgcccttcgcgccaacgccgaagacaacggtggtccgttgcaggcgttcaaggccgtgttccagaacgaccagctgctgtgggtcgccctgtcctacctgctgtacgccatcgcgaacgtgaccaccaccggtgtgcttctcttcctgttcaagttcgtccttgacaatcaggccgctttctccgcgaccggtgtcatcgccatgatcgcgggcctggtcatgtccccgctgtacccgattctgaacaggtacattccgcgccgctacctgtacatcggcggcatggtctccatgatcgtggcttatgtgatgctcgccctgttctccagcaacatcgtcctggtcttcatcgcgctggtgctcttctacgttcccggcacgctcatcatgatgacggtcatcctctccctgaccgactccatcgagtacggccagctgaagaacggcaagcgcaacgaggccgttacgctttccatccgcccgatgctcgataagatcggcggcgctctgtcgaacggcatcgtcggcttcatcgcccttgcggccggcatgacgggtgacgcaaccgccgccgatatgaccccgacgaatatccacgtcttcaagatctgcgcgttctatgccccgctcatcctgatcgtgctcagcctgctggtgttcgtctccaaggtcaagatcaccgagaagatgcacgcgcagatcgttgacgagctcgaagccaagctcgcttccggcgagatcgtcgacgatgaggcgcaggtcgtggaggccgccgaagccgccgcagccgtcggcgatgaggcgcaggcagttattaagaactgatctcccgttcccatccctcccataaggcccgtccgcctgaaccgcaagatgcggtccgtggcggacgggcctgttcgttcctgcggtcggcggtcatgtccaggcccatgcccatgccggttccggcagtggggccggaaccggcggcgtgtcacctgtcggcaagtgattatctaatagatagataaatccatgctctgggttcttaaggagaagattaatgagcaacgaaaatgtcgcggacggtgacgtccgcaggaagggcgggctcggccagcgcatcgcctacgcgtgcggcaacttggggcaggctgccttctacaacgcaatgagcacgtacttcgtcacgtacgtcaccagctgcctgttcgtcagctacagcaaggctctcgccgcccaaatgatcgccgtcatcaccggcctgatcgtcgttatccgcatcgccgagatcttcatcgatccgctgctgggcaacctcgtggataacaccaccaccaagtggggccgtttccgcccgtggcagttcatcggcggactggtctcctccgtgttgatcgtgctcatcttctccggcatgttcggactggtcaacgtgaacaccacgctgttcatcgtgctgttcgtcatcacgttcatcgtgcttgacgtgttctactccctgcgtgacatctcctactggggcatgatcccggcgttgtcctccgactcccacgaacgttccacctacaccgcccttggcaccttcaccggctctatcggctacaacggcatcaccgtcatcgtcatcccgatcgtcagctacttcacctggacgttcaccggcgccaagggccagggccaggccggatggacctccttcggcttcatcgtcgcgctcctcggcctgattaccgcctggaccgtcgcctttggcaccaaggaaagcaccagcgcgctgcgtgccaaggcccagaagaacggcaacccgttcgaggcgttcaaggcgctgttccagaacgaccagttgctgtgggtcgccctgtcctacctgctgtacgccatcgcaaacgtcatcacgaccggtgtgatgtactacctcttcgtgttcgtgcttgacgagcctgccgccttctccatcaccggcatcatcccgctgatcgccggattcatcatggcgccgctgtacccgattctcaaccgctggattccccgtcgctacctgttcaccggcggcatggtctccatgattatcggctacacgatgctcgccctgttctccagcaacctgccggtcgtcatcgtcgccctgatcttcttctatgtgcctgcgcagttcatccagatgaccgcgattctgtcgctgaccgactccatcgagtacggccagctgaagaacggcaggcgcaacgaggcggtcaccttgtcggtgcgtcccatgctcgacaagatcggcggcgcgatgtccaacggtgcggtcggtgccgttgccctcgcggctggcatgaccggtcatgccacggcagccgacatgaccgcgtccaacatcgccacgttcaagaccttcgccttctacgtcccgcttgttctcatcatcctcagcctcgtcgtgttctggttcaaggtcaagatcgatgagaagatgcatgcgcagatcgttgaggagctcgaagccaagctcgcttccggcgagatcgtcgacgatgaggcgcaggtcgtggaggccgtcgaggccgccgacgatgaggcgcaggcagttattaagaactgatctcccgttcccatccctcccataaggcccgtccgcctgaaccgcaagatgcggtccgtggcggacgggcctgttcgttcctgcggtcggcggtcatgaacatacccatgtcggttccggcagtggggccggaaccggcggcgtgtcgactatcggccaggagtgtctatcagctagtatcagctggtatccgatatgggccgtggccctgcgccgcctgccaaaggagataaccgtgcgtgcatgacgtgacttcgcatggccaaaactgctgaccgcggacggacgcggcatcgctttcggtggtgactatagtcccgaccaatggccggaggaaatctgggatgacgacatccgcctgatgggccaggccggcgtcaacaccgtggcccttgccatcttcagctgagatcgcctccagcccatcgaagaccattgggatttcgactggctcgatcgcgtcatcgacaagctcggtgacgtgaccgtcgccggaccgcatgtgcaggtgcttgcctcgtatgccggcgaagaagcggatgagtgggagcttgacggcatggccgcgatcacccgcaacacgtacggcgaaggggaggcgtatttcctcggctgcgatctgggcgtgagcgatctgacgcgattcgtgggaggctggcttgccgcgcagccgcaggatggccggcagccggaagccaacctgcggtcgcccgccagcggcgtgacctctgacgttctgcacaccgtgcgtcaatccgacgacgccatattcgacttctatctgacacgtggcagatcggatgtcgaactgcgcgacatcgcaggggagccgatcgtcctgttccgggcggaacggggcagtgacggcggcgcgtatacggtgcatcgcaatggcgttttcgtgacgaagcgcccgaacccgtcggtgtagtcagttgcgacgaaacaggagggcggagccgcggacggttttgtgagacggtccgcggcctcaccgttggaagccgcggactcggatcatcagcaacggacgcgccgttgatttccacttccggagcaacgatggtgagctttgccgcgacgagatgctgcaggacggtgccgacgtacatggtgcccggattctcccttcgccgctgcgctgcctgccgcagcagatgttccacggccgcatcaacggaaagcgagttgtcggactccagcttgaatggtttgctggtgaagaacgcctgaattcgtttgacccagtattgctcgatctcggtgaattgctctgctgtcggacgtaattcattgatgagctcggcatagtcatgcatcagcgccatggtgccgcggctggttcgtcccttaaaggttgaaccgatagaaccgtcattcattactttttcaacgataccgacacgctcattcgattgtgtccaatactgctttctttctgcatgaacaacggtactcggcaaggcggtaacgatagtcgcaaaggctaagaagcccgtacataatcgtttttttgtagtgtttcagattttcagtagaatggcgacagccaaatcccgctggcttgctagtaaagcgttgtcctcggggggagttttgtttgttgttgaaagataacgcggcatcgaatagataggggaggcccggcatgggacgtcatcagcgtgcagaaacctccggactcatctccttcttgatttgcgccgtcgttggcgcggtatcgatgaacctgtacatggaatacgcgccggccatctggcagctgacgcaacgccgattcatggtatgttcgggcatcgtggcggcatgcggcgtcatttccttcattattggctatgcgcgcaaatcacgttcattgaacctcaaacatggtttgtttgcaccgattcgtcgcattttcgaaatcgtcgccctttcggtggtgtatgcctcgaccattttcctgtcgtcttttgcactcatcggtgcggccaacgacatgatgggcaatgccatcttctccggctatatctccagcgtctgcgccgccttcgccggcgtggtggggtacatgacctttgtacaggcggagatgatgaacgccaaaactattgccagtctgttgccgttcttcgtcatctccggcgtggtcaccgccggcatgaccaccgacgacccatactggtatcacaacaacttttcgcagctcggcgacagaaccacgtttgcggcccgtatgttcaactccacgctgattcttgccggcacatgcatcatcatcgtcagctacttcgccatctccgaactggtgaccaccgaacggctacagcgcctctggcacgaccgcaccaacagagatccgaatcgcggctacgaaatcccacatttcatgctgcgcatctccattctgtccttcctgctgatggtggccggcctggcattcatcggcatcggcgtgtttcggtacacgccacacaatctcttgcacaatatatgcgccaaaggcctgccgttcgtcatgctgctgctgttcgtgctcctgccgtggcttgcgccacgcctgtccaaagcagtgatggtggcctccgacctgaccgcgctcgtatgcgctgcattctgggtcaatatgatgatgggtcacaacaccctcaccaatgtggaggcgttggctggtctggcgttcctcggctggttcatcgtgttctcgcgccagatcgccgccatcgaggccgatcgcgcggccgctcagttgttgcacgcgcaggccatcgaaggcggttttgagcagccgtcttccgcacctgatcagcagatcgaatcccgcatcgctgccgaccggtgaataatttgtttgatagatttggccttatgactgaacgactcacgaatctctggcctgccccgctcgccgcacagccgttgaacgctacggtaacggtgccgggcagcaagtccctatccaaccgctacctgattctcgccgccctcggcagcaagcccgttactctgattggcctgctgcgttcgcgcgacacggaccttatgatgggcgcactcgaagccctcggtgtccgctgcgacgtggattccgcaaccgacaccaccgtaacggttactcctcctgtatccggccgattccatggcaacgtcaatgtgttctgcggactggccggcacggtgatgcgtttcgtgcccggccttgccctgtttgcagatggcccagtgaattttgatggcgacgaacaggcttatgcacgtccgatgaagccggtgcttgacggtttggaacagctgggtgcaacggttgattaccacggcgaggttggccgtctgccgttcactattacgccgcctgcaaccttgccggctgcccaggcgcaggtcagcatcgattcgtccggttcttcccagttcatctccggcctgttgctgattagttccaaactgcctgacggtctgcacctcgcgcacacgggggagaagaccccgagcctgccgcacattcgcatgaccgtggccgatgtgaccggtgccggcggtgcggttgaggccgacgaatccgcccgcacatggacggttgaaccgcgcgcaatgcaactgccgagcaaggtgaccgttgagcccgatctgtcgaacgcggcgccattcctcggcgcggcattgattgccggcggcacggtccgggtgcctcattggcctgaaaccaccacccagccgggcggcctgttgcccggatatctggagcagatgggtgccgaagtatcgttcccgaccatcggcggcgtgcgctattgcgaggtgaccggtgacggcaccgtgcgtgggctgggtacgttcgatttgacggcggccggggagattgcgccctcgttggcggcgattctggtgtttgctgataagtcgacagacatggttggtattggtcacttgcgcggccacgaaacgaatcgtctggaggcattggtcaacgagattcgtcgtgttgggggagcggctgaggaattgcctgatggattgcgtatcgaaccggtgccggcggagacgttgcacggtgccgtgatggaaacctatgctgatcaccgtatggccacgttcgccgcgatgctggggctgcgtattcccgatatcgaggtcatcaacgtggccaccacgcgcaagaccttgcctgatttcgtcggtatgtggagtggcatgctgaggcagtaaggggtcctgtgttctggtggaactcccctcagtccgctacgcggacagctcccctcagagaagggagccaagttatagggcctggatcccctctctgagtggatctgtccgccggaggcgactgaggggagtatgacgcaggggtagtggtctcatgaccatatacgaatgggggctgattccaatcggaatcagcccccatagtgttgcaactagagattagtgagatgcctaacggcggttacttacttggcgaaggtgttgccgtaggtatcggtgccagcctcggcgattgcggcggacttgcgggcgatggccagttcttcgttcgtcgggatcacggcgatgatcacggaggagtccggagtggagatgatgcgcggttccttggagcgggtggcgttcttctcctcgtccagcttgacaccgaacggagcgagcttgtcgcacaccatcttgcggaccacgtcgtcgttctcacccacaccagcggtgaaggtgatcacgtcgcagccacccatctggtaggtgtagttgccgatgtagctgacgatgcggtgcacgtagacatccagagccagcttggcgtcctcgttgccttcggacaccagacggtgaacctcacgcagatcgccgtagccggtcatgcccatcatgccggaacgcttgttgaacagggcatcgagctcgtccacgttcatgtgggcgttgcggatcaggtggaagaccacagccgggtcgatgtcaccggtacggccacccatcatcaggccctcaagcggggtcagacccatggaggtctcaaccggcttgccggagacttcagcggaagcggaagcgccgttgccgatgtgcagaacgatctgcttcaggccttcagccggcttgccgatgacgtccggcaccacggaggagatgtactcgtgggaggtgccgtgggcgccgtagcggcggatgtggtactgatcggcgatttccttgttcagcgcgtaggtgctggcggccttcggcagctggaagaagaaggaggaatcgaagacgaagatctgcggaacgtccggcagcagggagcgcatgacttcggcacccttggcctccgggccgttgtgcagcggggcgagcacagccagatccttgacctggttgatggtcttgttggtcacgagggccggcttcgggaagatggagccgccctgcaccacacggtggccgacggcgacaatgccagcctcagacaggttcgggccgtactcctcgaagaagccgagcacgcgcttcagaccctgctcgtggtcgtgaatcggctcttcaagctcgtgcttttcgccgttgtactcgtgcttgtagtggccgtcgaccggctcaccgatcttctcgacgaggccggaagcgaggccttcgccggattcgagatcaaccagctggtacttgatcgagctggagccggaattgatgacaaggacggttttcgccattgtgggcatcctccattgtgattgaatgttcccgtgagacacgggttaccgttgattagattactcgttgcttgctacaaaataagcattacagtggctcccgctggcgggagctaagccgggctcactgcgcttcgatggcggtgagggcgatggtgttgatgatgtcctgcaccatcgcaccacgggacaggtcgtttaccggcctgttgagaccctgcagcaccgggccgatggccaaggcgccggaggagcgctgcacggctttgtagccgatgttgccggcgcacaggtccgggaagacgaacacgttgacgtgtccggccacatcgttgcccttggccttggtggcggccacggtgggggaccaggcggcgtcgaactggatggaaccgaccaccggcagatccggagccttctccttgagcagcttggtggcttcctcgaccacgtccacgtccgggcccttgccggagccgagggtggagtaggagagcataccgaccttcgggtcgatgccgaaggcacgtgcggtctcggcggactgcaacgcgatttcggaaagctgctcggcgtccgggttgaggttgatggcgcagtcggcgaacacggccacatggtccttgaagcacatgaggaacgcgcccgagaccagtttctggcccggcttggtcttgatgacctgcagggcggggcgcacggtgttggcggtggaatgcacggaacccgaaaccaggccgtcggcatagccgagcaccaccagcatggtgccgaagtagctggcgtcggtcagttgcttgcgggcctgctcctcggtcatgcccttcttggcacgcaactcgcacagtttggccaccatgggcttcaacacgttctcgtcgtccatagcctggaagcgggcgcgctccagactgttcagccccagttccctgccgcgggccaggatggcgtccttgtcgcccacgatgatgaggttcacgatctcgcgctcaagcaggtagtcggccgccttgatgatgcggtcctcctcgccttcgggcagcacgatggtcttcttgttgctcttggccttgccgagcaggtcgaattggaaggcgtacggcgtgaccggcgcggtgacgtccacatcgagcgcggcgagcacctcgtcgatgggagcgtgcttgcggaaggtctcaagggccagatccttggtggattcgtcggtgaagggcacctgcggcagggtccagaccggcaggccgtatttggcgagggtctccttgacggagaaggcgtggcgcggctcgcagccggtcacgaagatgccgagcaccgtattgcccgcggcgcgcatgccctcgatggacagcttgacggtctcgtcgagctcgtgcggccatcggtccatggtgcacacggccaggaacaccccggccttcagatcggcggcgacgtccgcgttgaactcgtaggtggtcgggtcgttgacgtgggatttgtcggtgccgacgatcagggcggcgttcgcgcgggagacctccatggcgtagttgaactcgccgacgatgtctccgcgggcggtgtccttgtcggcgcgcaccttatgcacgtcgaggccggtggacagggacacgccgagtcccgcattggaggcggcgagcaggatgggggtgaattcgtcatggttcgacacggccggccggaacaccatggtcttgtacttggaagtcaatgcgttgagcacgccgtaagcgacgacgttgcggccattggcgccttcagggctggcgatatatacacgggtgacggtcacgatgtttttgtctcctttgatgatcaacacgatagggaccacacctcattgtagtggcgattactgttatcgctcacgccggtgtcgcgccaatcggaagagcgtccccttggcgatactttccggggaaagtatcgcactgcatgcattccagtccctgttttgcgacgcattcccgggaatgttgcgcaaaagtcgcccgataggatagaaaacgaaaaaggccggtgtgtgaagcaccggccttgattgtggagctagggggattcgaacccccgaccctctccatgccatggagatgcgctaccagctgcgctatagccccgagtgaagctatccgattcatgggagtcacaagacccgccacgaaccagcggagaaaccaccatatcatccgatttgatggcttcgtcgtggagctagggggattcgaacccccgaccctctccatgccatggagatgcgctaccagctgcgctatagccccgttttcaattgttggcccgttgttcggaccttgtatacattacgacgagatgtcgattctggcaaaagccggcgtgtcgccaaatgacaaaagtgtgatttggcgacactttttggcttgtttccgccattattcaggcattgagtcattcagttattgcttgaacggttccgaatgcaccggacctattggattagcaggggagtcgggaacatgatcagcgttcgcgttcccattcgtcggtgtcggcgatggccggaccgtgattgtagtccagcagacgccagcgcacagtgccatcgggattgtccatcggcaccaagcgcacccagtgcgcattgcgcaatgagaccaccgtggagaaggtcggatcgatcgcggaaatgcccaacagggtctgcaatgtctgcgcgatccatgcgccgtgcgagaacacgaacaggtccgtgtcgtctccggcacgcgtggaccagtcctcaagagcctccacaccgcgtttgcctacggcttccttgggttcggcaccatacttcagttcaccgccccgagactccatccaggaacggaagtcctcagggtagcgttcggccagttcagccacggcatggccatcccagtcgccgaagctgcgttcacggacgcgatgatcatcgacgggctcgattccacccaatacgtcggcgaaagcctgcgcggtggcgtgcgcacgcttcaaatcggagcagacaatgaaccggtggttgatttccggccgacgatcgacgtacaggcttttcaaggccgcggcggtctgcttgacctgccattcacccacggcgtccagcggaatgtcgacctggccttggagcttgtgagcggcgttataggaagtgcgtccatgacggataaggaaaatggaacgaacatgattggccatagtgacgatcctttcgattccagtgaggaaacagggaaaagggagggctgcctggtgccgtcaatgacgttcggcaacaggcagcccgacacacgagtatcagcgagtatcagcgaatatcagcgttatgtgattcgcacgttacgcggtggtgacggcagcagcgtccgcatgctccgccgtttccgggtgtgcgagttcaagatcgatggccgggcagtcgcgccagagtcgttcgagcccgtagaattcgcgcgattcctcgtgcatgacatgaatcacgaaatcaccgtagtcaagcagcacccactggccctcggtcaggccctcgcgagagcgcggctgacggccggagcacttaaggaacaggtccttttcgatttcctcggccacggccagtacctgacgctcgttggaggcgccggcgatcatcatgatgtcggtgatgccgagcaggtcggctacgtcgaaggccacaatgtcggtggccttgatacggtctgcggcctcggcggccacgcggacggcgttgatggaatcctgaagtgcgggcatggttcagcgctcccaggcgggcttccagccctcgacgttgtgctgcgtgttctcggagtagaccatcgtgtcgctcggcacggcgtggcgcaccacggagccggcaccggtggtcacgttgtcgccgacctcgaccggggccacgaacaggttgccggcgcccacatggcagccagagccgatggtggtgcgattcttgtgcacaccgtcatagttggcggtgatggtgccgccgccgatgttggtgtggtcgccgagctgggcgtcgcccacgtagctcaggtgcggcaccttggtgccgttgccgatgtgcgccttcttcatttcgacgaacgcgccggccttggcatcctcgccgaactcgttgcccgggcgcaggtaggtccacgggccgatgttcgtgcgtgcgccgatgtgcgattcctgcacgcgggaacgctcgaccacggcaccttcgtccacggttgcgtcaatgagggtggtgtacgggccgacgatggcgtcctcgccgaccaccgtgtggccttgcaggaaggaaccgggcaggatggtggcgtcgcggccgatctggacatcgtcctcgatccaagtggtttccgggtcaagaatggtcacgccgtcgcgcatccagcgctcgcagacgcggcggttgtaggtcttggacagcgcggccagctgcacgcggtcgttcacgccttcgacggtgagcggatccggagcggcgaacgcgccgaccttgccagcggccttggcggtttccagcgcgtcggtcagatagaactcaccctgcgcgttgttcgacttcagtccggcgattgcctcggtaagcacggaagcctcgaacacgtagaccgaggtgttcacttcctgcacggcgagttcgctgcggttggcgtccttctgctcgacgatgcgcagcacgttgccttcgcgatcgcggatgatgcggccgtagccggtcgggtcatcgaggatggtggtgagcacggtggcgccgttgccggaggcggtgtggaattcgaccaagcggtgcagcgtctcgctgtcgagcagcggcatgtcggaggcggcgatcagcaccgggccatcgaccttgccagcctcggtgagctgtgccattgcgcactgcacggcgcgaccggtaccgggaatgtcgtcctggttcacgatggtgacctgctcgtcataggagcgggcggcttcggcgacgcgctcggcctggaagtgcacgaccacggccagcgtgtcggggttcagggcggtcaccgaatccatgaccctgttcaggaaggtcttgcctgcaaaagtatgcagcaccttcggcttgttggaacgcatgcgggtaccctcgccggcggcgaggacgatggctgcggataatgccataactgacgtattcccttcgatcggaatgtctattgagggtggaaacacctcaaaacaatagacggccgcccggatgtcgagcggccgtcagccgttcccccacctggactcgaaccaagacaaagggttccaaagacccgtgtgctgccattacaccatgggggagtcgtgggctttcggcccacaagtgttcatttataccatactgtcggtatttaccgaaagactacgccatgtcgcgtctcgcatcatgtgctttccttgaacaaacacgcacgtgatcaggcgaacaggaagccttgaccgtggtgctcggggtaggtgtcgaacagttcggcgaccgagccgtcctcgaatacggcgcggatggcgctggccagcagcggggcgatcgacaggacggtcaagccatcccagcgcttttcctcgggaatcggcacggtgtcggtcagcacgacctcgcgcgcaccgcagttcttgagccgctcgatggccgggccggagagcacgccatgcgtggcgaccacggtcaccgacttggctcccgcgtcctgcagcacgtggcatgcgcccgcgatggtaccggcggtgtcgatcaggtcatcgacaagcacgcagtccttgccggcgacgtcgccgaccacacggttggcgaccgcctggttcgggcgggtgatgtcgcgagtcttgtgcacgaaagcgagcggaccgccgccgagacgctgcgcccactgctcggccacgcgaatgcggccggcgtcgggggagacgacggcgacgttgtcgagatggccttggaaacgatcacggatgtagtcgaccagcaccggcatggccaccagatgatcgaccgggccgtcgaagaagccttgggactgcgcggcatgcagatcgaccgacatgatgcggtcggcaccggcggtcttcagcaggtcgaacaccagacggcaggagatgggctcgcggccgcggtgcttcttgtcctgacgggagtagccgagcaacgggcagaccgccgtaatggaacgggccgaggcgcgcttcaatgcgtcgatcatgatgagctgctccatgatcgccttgttgatgggtttgtagtggctttgcagcacgaacacatcggcgccacgcaccgattcggtgtagcgcacgtacatctcgccgttggcgaaatcgtatgcggtggtttcaaggacgtcgatgccgagctgctcggcgacatcctcagccaatttcggatgaatccttcccgtaacgagaataagattcttatcgggcttcccttcaaggattgcgctcaccatgtctcccaacgtgtggtctcgttgatgcagtcttcagcatagccgttcttcacgaccggttggacaactcagcgttgcctgccgttcacctgccgcttgcgatccattgttcgatggcctgtttgaccgcctttgcatagatatcgctatccatgcttgggtggatgccgtcggagccgagcacctgcgcgttcgcgttggctgtggcattccaatccaccagcaccacattgtccggatgtgcggccgcatagtcggcaagcacctggttggtaggtggaatccacgtacggtctccgtgggcattgaccagtaccagcacgcggtcggggccgatcatattacgaatctggtccagctgatcaggggtgattgccgaattggtgccaaggccgatcagcacccattgccgcagactgccggcggacagatcattgccgatgagttcgggggcgaccatgatggagcgggaaacgctcgcgtcggtctgaatgccggggaagacttccgaaaggccctgtgatgaggccagcatcaccgaatcgcctatggcggtaatctgatcgccggtgggcatctcatgcttgggcttgggcggtgccggcacggcatggcgcagcagcacgtgttcggttttctgtatgcgttccagttgtgcggcctgttgctccagctggatctgcatggcggttttcgcaggtgcatgagtaatgccctgcgcgcagccgaccaacgacagcgccaggataacgtcaacggcaataacccgggccgcatgattcttcttgttcgtgcgaaggggcaccacgacggatatcaccgagtgcattgccgccggtttctccaccatcagccaggaaatcatcaccgcaatggcggtgagcaacgcggtcatgatgagaggccaaggccctgctgccttgaagatcttcggggcaagggcgctggaaagaatccacaacggccagtgccacaggtaaatgccgtacgaatacttgccgagggcggccaatggcttgaacaccatgaggctttgcatccaggaatcgtcggagatggtaccggcaatcagcagcacggacaacaggctggacaatatgatgccgccgcggaaggcgaatgcatcctgtttgccgataaccgtcatggtgaccaaggcaatcaggctgaggaatgccaataccggtgccgtcgcattccagatgcgatgctttacaggaatctgaggtaacggagcccggtacgtggcggccgaagcgctcgatctaatggtgcggggcatcggcacagctccctgacgagcgtggcccaactgaggagcggtgacccaccaggcgagagccacacccagcatcaggcccatgctgtgggtatcggtgccgaagtagacgcgggtggggtcgcccttgggcacatacatcgcccacatggcgatactgctgaacgccgcgagtcccagtgggatgagtgagggcagtttcgtctggcggagcttccacatcagccagacgatgaacggcacgatgacgtagaactgcatgagcacgccaatgaaccacagatggcgaaacacctgcgggttcatttggtcgaaatagctttggcctccggcaatggcgtaccagttgtagcagcccagcagcacggtgatgacttggtcgcggatggaaactagaatgtcgtgatcgagcagccagccgacggagacggtgaccggaatcagcagaaacagcgccggatagagacgtactgcacgcttggggatatatcgcacgagattcagcgatccggttttcgccagagaacgaatcaaactgacggcaatcaggaatccagagacggtgaagaacacgtcgactccgtagaatccgcctggcagcagttgctgcatgcagtggtacagcacaatggctatcagcgccagtcctttaataccgtctagacccacgaaccgattcacggataatccttctctcaccgtagtgctgatggcatcccccgttctctccaacaaacggaaaacaagcccagcatggtcgaggggagagacaatgcgacagcagcgaatcgtcaggccgcatgctgcatgattaccggcttgacgattcgcggcataccgcgcttatcggtggcgtttaccggtgatacagactcacccgttcgtacttcggttcgcagcacacgttgatgccgagtttgcgatacaacgcctcgtccgtggatgagatgataacggagaaaaaggcgtcgcagccctgcaactgtttgagcccgtcgatgacgcgagcggccacaggactggtggcgctggtgattgacaatgcaatcagcgtttcatccgagtgcaagcgtcggttcacgctgttgagatgttggcggcttgcagttcgatgtatttttcgttgtcgaatctctggcgcaaagaggtcggcatccctttccggacgacgtcgtaagcgaaaaaattataccgggcatcgtcggcaacaaaaaagggattccccgatggagaatcccattcgtcacagagagcaattactcccattcaattgtggccggcggcttggacgtgcagtcgagaacgacgcggttgatctgtcggcattcgttggtgatgcgcgtggagatcgtggcgagcacgtcgtagggcacgcgagaccagtcggcggtcatggcgtcctccgagctcaccggacgcagcacgatgggggagccgtaggtgcgctcgtcgccttggacgcccaccgagtgaacgtcggcgagcagcacgaccgggcactgccagatgtcacggtcgagaccggccttggagagctcctcgcgggcgatggcgtcggcctcgcgcagcaggtcgaggcgctccttggtgatctcgccgatgatgcggatgcccagacccgggcccgggaaaggctgacgccagacgatttcgtcgggcagaccgagctcggtgccgatggcgcgcacctcatccttgaacagagtgcgcagcggttcgatgagctggaacttgatgtccttgggcaggccgccgacgttgtggtgggacttgatgttggccgcgccgtcgccgccgccggattcgacgacgtcggggtagagggtgccctgcacgaggaacttgacttccttgccgcgcgcgccggcctcttcaagcacttggcgctgggccttctcgaacgtgcggatgaacttctcaccgatgatcttgcgcttgcgctccggctcggagactcccttcagggcctcaaggaagtcgtcggccgcgtccacggtgatgagcttgatgccggtggcggcaacgaagtcgtgcttgacctgctcgacctcgcccttgcgcagcaggccgtggtccacgaacacgcaggtgagctggtcaccgatggccttgtgcaccagagcggcggccacggcggagtccacgccgccggacaggccgcagatcacctcggcgtcgccgaccttctcgcggatcttcttgacttgatcctcgataatcgaggaggcgtcccagtcgttgggcagcgcggcgcaacggtgcaggaagttttcgataagcttctggccaagcggggagtgcttgacttccgggtgccactgcacaccgtagagcttgcgggattcgtccgccatggcggccacgggcgcgccttcggtgtgggccagcacttcgaagccggccggggcctgttcgaccgccacaccgtggctcatccacgtggtctgctcggcgggggagtcggcgaggatgccgtcggcgtcgtcgatggtggctgaggtcttgccgtattcgccgagagcggccttatccaccttgccgccgagctcataggccatgacctggaagccgtagcagataccaagcaccggaacaccggattcgaacaccttggtatctatggtcggcgcgccgggctcgaacacggaggccgggccgccggacaggatgatcgccttcggatccttggccaggatctcgtcgaccggcatggaatgagggaccagctcggagtacacgcctgcctcgcgcacgcggcgggcgatgagctgggcgtactgggcgccgaagtcgacgacaagcacaggaccgtttgccattgatattcccctaacgttcattggaattttacgtgggctgaacacccctgattatcactggtcaaggcgacaaggccgacacgcagggactatgtgcgcaaatcgaacaaactacatgcctgtagtcggacaacacgccgatttcgaacatgggaaatcgaacgtgcgctgttctagccagatgctagatttccgcatgcttccgccgttctgaaaaagtatgttgaaaaaactaatgttgacaaacggtcaggtgaaccgcacaaatactgaaatttccgcaacaatttcgaacacacccgcaagaaatcgttcaaaagtcgcgttgtcctcgtaccatgacgattgattgggaacggaaaaccttggcaccgcaagggtcaggaaccgtgaccgaacagaaataatcaatcgcacgatcacgtgcaggagtacaggagtacacatgacgagtcctgttattggcaccccttggaagaagctcaacgctccggtttccgaggaagccctcgaaggcgttgacaagtactggcgcgttgccaactacctttccatcggccagatttatctgcgttccaacccgctgatgaaggagcccttcacccgcgaagatgtgaagcaccgtctggtgggccactggggcactacccctggcctgaacttcctcatcggccacatcaaccgtttcattgctgaccacggccagaacaccgtgatcatcatgggcccgggccacggtggcccggccggtacctcccagtcctacctggacggcacctacaccgagaccttcccgaagatcaccaaggacgaagctggtctgcagaagttcttccgtcagttctcttacccgggcggtattccgtcccacttcgctccggagaccccgggctccatccacgagggtggtgagctgggttacgctctgtcccacgcttacggtgccatcatggacaacccgagcctgttcgtcccggccatcgtcggcgacggcgaggccgagaccggcccgctggctaccggttggcagtccaacaagctcgtgaacccgcgcaccgacggtatcgtgctgccgatcctgcacctcaacggctacaagatcgccaacccgaccatcctgtcccgcatctccgacgaagagctccacgagttcttccacggcatg

SEQ ID NO: 2984 - DNA, 10603 bp, Unknown
  R19_24m  MAG No. k141_11242
aggcggataaggcgagattcgaactcgcggaggctttcacctcacacgctttcgaggcgtgctccttagaccgctcggacacttatccatgctgccaaaatggcaacttgttcattatgccacattctgccgacctggcaaatcggagtttcgctgagcaagtctcgagtgtatgccgcttgagacatgtcagatcacaatcccggaattcgcccgaagcgctggcattgcgtttacgcgccaagcactccgacaggaattacatacactccatcatcgcgttgatacgcgaactcgccgacccccaccaacaccgccaagaactccggttcacgggttcgcgcactcggatttctcagcagtttccctttcagtctgcatagatttgccgctgcctcagggactttatcctcactggacttaatttcgatgccgccccaccgtccatcggacaattcaataatggcatcacactccagaccggaatcgtcacgataataccgaaccggttctatcccaatatcgaggagagatctcgcatacaccaacagatcacggatgcatagattctcaaacagaaacccaaaagtctgccaatcgccgataagagcagcaggactcatgcccaacattgcggccgcaatggaaggatcggcaaaataccgacgcgccttggtctggagtcgctttggatcccgtgccggcgggacccagccctttatcggatcgatgacgaacatgttctcgaacatggccgtatacccggataccgttctctccgaaatgaaatcgtcaaggttttcttcagtaccgtacatatccttacgtaaggttttgaatgtcacagcttgactgatattgcgcgcaagcgaatccagcagacgacgagccacatcaggatccttgccttgcctgggcacactctcagtcagcgtgagtcgcatgtattcccgaatcagaatctgtgcgtcagatacaggcagagccaccgcctccggccatccacctcggcatacggcatccaacaacatttgtgtacttatctctgattttgcagcggcgaacttatgttcaaacagtccactgagacttaccgcacctgtcgagagtccggactcatataaagtcagaggattcatacggatacgtccgattcgtcccgcaccactatggttcggccgattctcattgagaggagtggatgaaccggtcagaatccactgacctttattcgcggaatcatcgtcgacgcgatgacggacttcatcccatatagctggagcgagttgccactcatccacgatatgaggcctatctcccagcagcatcaatgacggatccgccttagccgcagccaaattgttattgcgatccacataggtaatgctggctgcatgggcccgcgcagaccaagttttcccgcaccacttggtgccggtaatctccaccgcgccaaagatgcgcatatatcgttcgatctgtgcatccacgatacgagggcgataggctttcggcttgatgtcgctcgccagagaatcggccattccgcgcacctcccgttatttcacgtccgccatcgcaataatccgaatttctcaactaccaaaatccgaatgttgcaacgacgaaaatccgaactttctaactacaataatccgaatttttcaactaccaaaatccgaatgttgcaacgacgaaaatccgaatattggtggtggtagaagcggtgacgggaccactctgcattgagcggtctctctcagtctcgctacgctcgacagctcgaacgcaatttaaggacagctttccagctgccattttatttgctcactgtcattcgccttcgcctaaaaacgcctccggcgttttcttcacggctcagctcatcagagggggcttgaaattttgtttacgccacctgttcgtggacggaggcattgacccattgggtctgctggacgttgtagccggagaagatgccgatgtcgagcatgcagtcgcggtaatcgcggccgtgggcgatggtgatgtagctgtcgtccaccaatcggttatgcgtgggatccagtccgacccatcggccatcctgatacacctcgacccaagcgtgggtcgcgccctctcccccaagcaaaccggcaatgtagcgcgcggtcaatcccacatgccggcacacggacagcattacatgggcataatcctggcatacgcccttgcgctgggccaaggcctgttcggcggtggtgcgaatcgtggtggaaccgggcgtatacacaaacgccttgtagacctcatccatcacttcggcggcctgctgcaccggagtggcgtcggcaggcaacgcagccaagcgttcgcggcatacgtcgatcatcgcctccacgttcgggccgggaatggtgagcgctgaattgaatcggtacagcggtttataggcttccttatggatatgcgcattgtccacgaaggcgatgccggtcaccgaatagctgaatatgtcgtgcggctcggggatgaatccggtcatcaccacggagccaaaggagtcgatggtggtttcgagttcggtttcgggctgaatcttcacttccacgtcaatcacctgttggcgagggccagtggcgggaatacagcgaagctggaacctgtgatcggtgaccggtgcgctgaaggacagcttcatctcatagtcgaacacgagttttttcacaacgtctcctgcacttacacacgagccggcaaccggcacattctcgggataacgacactacagccatggctgaggtatggtccgcgcgctcacagtccacgcatatattccggcaattcgccgatacgcatcggccggcactcgggcgcacggtttttcgccataccaccatagcatttgaacccgtcagggcgaacgtcgggttaggggcgcttggcatccatgttcatggagctcagtgagcccatgtctttgatggccagggcgctgacacggccggaataatcgtcaaggtacttcttcagcaggtcggcgacttcctgatacccgcgagacggcagctgaccgaccagccagctcagcccatcggcgaagcaactaggcaacggcatgccgtcgaggatcatcgagtaggaggcgagcttcctaagcggggcttccatctcctccatcgtcaggccgaagcgcgtgtacaggtcgatgcgctcaagatacttgccgatgaagatgaacgccttcagcgtggggtcgaccggcgaattctcgatgccgccccagaaggcgagcatgtcatcggtaatatcgcgctgcttgtagatgtcctcggcgtcggccgcgtatttggcggcatcggtgatattggtcatcgccaactccacgtactgcaacagacgcgagctcaattccgggcgcagaatcacggcgttgttgaatgcggaggttacggccgaccgcaccgaatcagggttggacccgtcgtacaggaagctgttcacgaacccgtcgaagtcctcgaaatcttcgggcaggtcgagtgcgtgagcgaacggacggaaggcgtccacatcggtgtccatcacacgatcgtagaacgggaagaactggttcagcgtggtgaaggcgcgctcggtgtaccgacccagccaatacaggttgtctgccttggaggcggtgaccagagacaacgagtggcggcgggactggctcagcaggttcgccacctgcacttcagcaccgtattcatgctccacgccggattcgggtgccaacacccacgtatccttgaatccgccaccctgcgacgagttgacgatcatctggccgggcaccgacgagtatcgagtcaagcccgaataccacacgtgcgtgtttttgccggtgaccacaaaggcacgcaaatcgcatttgcgcggcgacatctcaccggtcttcgggtccaccacatcgatatcgcggaactgaatcacctcttgggcgatgaatcgacgaggctcctccttgatccggttggcaagctcctcacgtgcggcagcatccagcgacgaaccgaacaccacgccgtaaccaccggcttcggccacatccttgatgaccagctcgcccatacgattcaggacttccttacggtcggcctcgaacatcggcatatacgtgggcgcgttgttgagaatcggttcctcgccgagatagtacttgatcatctgcggcacgaagtagtagatggccttgtcatcggccgcgccgttgcccggcgcgttgacgatggccacgttgcccgcgcggtaggcggacaggataccgggcacaccgatcaccgaatcaggattgaaggcaaacggatcgaggaattcgtcggacagacggcggtagaccacgcccacacggtggcgtttgccggcgtagtcgaggaagtagaccttgttgtccaccacttcgaggtcttcggggaaggccagtgcggcgccggttttctccgccagataggcgtgctcgaagaacgcggaattgtagcggccgggggtcagtaccacggcgatgccctcagtggacacaaagtccatggccttgcgcagtaggcgcgggtattcgcgattgtcgcggatgtgcacgtcgcggaacaggcgcggggagatgcggcgctcgatgtcgcgcacgaacagcgggtagctggcgcccgaggggatgcgcaggttgtcttccagcacccaccagcggccatcttcaccctggaccaggtcttcgccggcgatgtgcgcgaagatgccgccgggaggggtcacgccgttgacctgcgggaagtagccggccgaggtgtatacgtattcctccggcacgacgccgtcatggatgatggccttgtcggagtagatgtccttcagataggcgttcagggcgttgacgcgctgcttcaggcccttctccaattcgtcgtattcgtcggattcgataatgcgcggcacgggatcgtacgggaagagccggtcatggtattcgccgttcttgtagatgccgaagcgtacgccgttgcgggacagctcgcggttgatcgcctcgcgacggtttaccagttcatgggccagtctgcgtgctgcggattcgatcatcgtgcctgctccttgctgtggcggcttctgtggcctcaagcggttaggcgtttcgagcgcacgctgacgccgcaagccgtaaccgggtttgatggttacaacctaaggcggccccgtttcagcaaacgcgcgagaatgttacaggcaggtcacttcgccgaccgcactcgtctcgccgaccgcgcgcatctcgccgaccgcactcgttacaatgaatggctatgacacgactgcgcattgacttggcctacgacggcggcggattctatggctgggccaaacagcccaatctgcgtacggtgcaaggcaccattgaagatgcgctgcacaaggtgctgcgggtgccggccgatgatgcggccgaaccgttgcgtctgacggtggctgggcgcaccgacaccggtgtgcacgcctcccaccaagtggcgcatttggatgtatccgatgaggtactgaatcgctgcgtaggtcacatgaccattccggtcaccgaggcgctgactcgcagactcaaggctgtgctgccttcggacatcgtcattcatggcattgccgtggcaccggccggtttcgatgccaggttctccgcattggagcgcacttatgtgtatcgggtcgccgatcgttcgtccgagatcgacccgcgcctgcgtggatgcgtgcttaccgtggatgaatcgctggatctggagcttatgaaccgcgcagcctcattgaccatcggcctgcacgattttggttccttcgccactccgaatccgggaggcactacgatccgcgaagtcaagaccgcctattggcggcgggtgccgatcactcccctggtgccggatgcgatggcatcgcatgaagcatatcggactccgtcgctggagtccggactggcggtgttcacgattgtggcggacgcctttgcccgcaatatggtgcgctccttggtcggctcatgcatcaaagttggttcgggacgcaaatctctggaatggtttgccggcaaaatggccgagccagtgcgtgaaggctcaagcgggccgattgcgccgcagggcctgactttggagcatatcgcataccccgtcgatgatcagctggccgcaagagccgaggccattcgagccgtacgtacgttgtagtttctatgaaacaacgcaaaagggctggaacccaaacggattccagccctttcagctagcttggcgaaacgctattcagctcactcggccttctcggcgtcagcggcttcctcagcgggagcctcagcctcagcggcggcggtctcctcgaccggagcctcagcggcctcagcctcaacggccggagcctcttcttcggcaaccttggcggcggcttcagcttccttcacaacagccttcttggcaaccggctcggtgacgagctcgatcacagcggccggagcggcatcgccaacgcgcggggcgatcttgacgatacgggtgtagccaccttcacgctgctccatctgctcggcaatctgggtgaacagaatgtgcaccacggacttgttgcggatgacgcgcatcacgcgacgacgggagtgcagatcaccgcgcttggcgaaggtgatcaggcgctcggccagcggacgaaggcgcttggccttcggcagcgtggtggtgatgcggccgttctggaacaggctggtcgccatgtttgccagcatgaggcgctcgtgtgcggggctggaagccagacgcgggcccttcttaggtgtaggcattgggtttactccttatatgtccgttcttcaggcaagcaggtgggcatatgcccgaacatccgcttgcctagtgaacgaacgattggtcaaagaggcagatcactcgtcttccggcgagaagaacgtaccaccttcgagattattggtatcgaaggccatcggcgaggacttgaggctcaggcccagggtctgcagcttctccttgacctcatcgattgacttcataccgaaattgcggatgtcgagcaggtcctgctcggtgtgggagacaagctcaccgatggtgtggatgccctcgcgcttgaggcagttgtaagaacgctgcgtcaggttgaggtcctcgatcggaacggccatctcggggttggtctcctcggccaccggggccggaccgacctcgacgccttcagcctgggcgttgagctcacggcacaggccgaagagctccaccaaggtggaaccggcggaagccaccgcgtcacgcggggagatggcgggcttggtctccacgtccagaatgagcttgtcgaagtccgtgcgctgttccacacgggtggcctcgaccttgtagctcaccttgagtaccggggagtagatggaatcaaccggaatacggccgatctcatcgttgtcctgcttgttcatctgggcaggaacatagccacggccacgctcgacggtgaactcgatctcgagttcgccatcgtcggcgagggtagcgatgtgctgctccgggttggcaatagtgacgccggcaggcggggtgatgtccccagccacggcttcgcccttgccgctcttgcgcagatacatgaccacaggctcgtcatattcgctggtgagcacgatgcccttgatgttcagcaggatctcggtgacgtcttcctggacgcccggcagagtggtgaactcatgcagggcaccggaaatacgcacggaggtcacggcagcacccgggatggagctcagcagcgtgcgacgcagcgagttgccgagcgtgtagccgaagccaggctcgagcggctcgatggtgaagcgggagcgctgcggattcagagattcctcggtaagagtcggacgctgtgcaataagcactgtggttatcctttcagcttgaactcggtggtgcactcaccggtcaggcggttttggatggatttggtattgctgagtgctcagacgcgacgacgcttcggaggacgaacgccgttgtgggcttgcggggtgacgtcggtgatggaaccaacctcgaggcccgcagactgcagggaacggatggcggtctcacgaccggaacccgggcccttgacgaacacgtcgaccttcttgacgccgtgttccatcgccttgcgggcggcggactcggcagccataccagcggcgtacggcgtggacttacgggagcccttgaagccgacatcaccaccggacgcccaggacaccacggcaccggacggatcggtgatcgaaatgatcgtgttgttgaaagtggacttgatgtgagcctggccgaccgggaccgacttgcggtcgcgacgacggggcttacgagcggcttgcttaggcgctgccattgaccctcgtttcctagtaacgaactttgttgttgacgttcgggcgatgggatgaaatcatcccgtggcccgaatcatgccaccgactacttggtggccttcttctttccggcgaccgtgcgcttcgggcccttgcgggtacgagcattggtcttggtgcgctgaccgcgcacaggaagtcccttacggtgacgctggccttggtagcagttgatctgaatcttgcgacgaatatctgcatcgacttcacgacgcaggtcaccctcgatcttgtagttggcttcgaggtagtcacgcagcgtaatcagctgctcgtcggtgagatccttgacgcggatgtccgggctgataccggtcgcggcaagcgtttccttggcacgagtgcgacccacaccgaaaatgtaggtgagggcgatctcgatgcgcttctcattggggatgtcgactccggcaagacgtgccattgcgattccttcttgttgccgtaggtcttgcacccgctcgcccggttacccggcacgggcctacgtacccgtggttcagtgtcgttcccttgcgggaagcactgtgagagagtgccttatttacttagtgccgctggagaatctgctctcagccctgacgctgcttgtggcgcgggttgacgcagatcaccatgacgcggccgtgacggcggatcacgcggcagttttcgcagatcctcttcacgctagggctgaccttcatggttatccttttcttgtgtacctttacttgtaacggtacgtaatgcgtccgcggttcaggtcgtaagggctcatttcgagcacgacacgatcctgcggcagaatacgaatgtagttcttacgcattttgccggaaatcgtggcgagcacgatgtgcttgttctcgagttcaacgcggaacatcgcgttaggcagtgcttccactacctgtccttcgacttcaatcacaccgtcttttgccatgtgcctctagtcctattccgtcggatgattactatggcatatccgaagacacaccaactgtcaactatatacgcacatacccctgtacgaacactcggcgtgtcgcacaggggtatggaaacgttgatgtggtatttcggcatcactccggcttgttggccgggctgccgaacctactactcgaggtggctgatgatacggccgctgatctcgtcgatgtcgccgacgccgttgaccacgacgagcaggccacgggattcgtagatgtcgagcagcggagcggtttccttctcgtaggtctccaggcgcttggcgatggcctccggagtgtcgtcagcgcggccctgctcggcggcgcgcttcttcatacgctccagcagcacgtcacgggcggcttcgagggccaccacgtggtcgagcggagtgtcgaggtcggcgagcatctcgtcgagagcggtgacctgggcggcgttacgcgggtagccatcgaggatccagccgttattgcagtcttccttggccagacgatccttgacgatcttgttggtcagggagtcaggaaccagctcgcccttgtcggtgtagctcatcgcctcaagaccgagttcggtcttgttcttgatgttgtagcggaagatgtcgccggtggagatggtggggatgttgaagtgctcggcgagcagagcagcctgggtgcccttgcccacgccctgggggcccatgatgagcagacgcatggtggtctccttttgtgtcggttattaatacggttttggctcccttggttaggggagccattgagttatatgtggaagaaagattgctccgtcgtggaactcctcgcgcggccgcctgcccattgcgggcgaccgctgccaagcgggcgtcagccttctttgtggtccacgttttcgaacaggaagccggtgtactggaactgttcggtctgggccttggcctgacgcagggtgtcgaggcccacgcccgcgataatcaggatcgtggtgccaccgaacggcagcttggcgttgagtccgagagccatgatcagcacggtcgggatcagggccacgaacagcaggtagacggcacccacggtgttgagtcggttcatcacgtaggtcaggtaacggctggtggcgttgccggcgcggatgccggggatgaagccgccgtactgcttcatgttgtccgcggtctcgtccgggttgaacgtgatcgaggtgtag

SEQ ID NO: 2985 - DNA, 15216 bp, Unknown
  R19_24m  MAG No. k141_11421
cccatgttgacggcaagcatgatttcggtgccggctttctggctccagcggtagaagtcgtcgatgcccatctcgttggtttcggtgcaatgccaggccaggtcgcggcgcacggggcgattctcgcgtggaccgatgccgcctgcggttccgacaccgccagtggcaagccggctcaagataaggacgttaccgaaatcaccgtgtgggcttgggagcccacgctgacccaggttgccaaggacttcaccaagaagaccggcatcaaggtcgatctcaagaacgtcggcaccaacaccaaggaatacacccagcttgataacgccatcgaggctggctccggtgctccggacgtcgctcaggttgagtactacgccatcccgcagtacgccatcaagggcaacctgctggacatcaccgacaagacctccggctactccgacttctacacccctggcccgtgggcttccgtgcagttcgccggcaaggtctacggcctgccgatggattccggcccaatggccttcttctacaacaaggaggtcttcgacaaggccggtgttgacgccgagcagatcaagacctgggatcagtactacgacgccgccaagaagattcacgctctgggcgacaactactacatcacctccgacaccggtgacgccggcttcttcgactccatgacctggctggccggtgcaaagccgttccagacctcttccgatggttccgaagtcaccgtcaacctgaccggtgacaagaacgtcaagaccttcaccgacttctggcagaagctgctggacgagggcctgctcgacaccaagaccgctggctggtctgaggactggttcaagggcatggtcgacggcaccatcgcctccctgttcactggcgcttggatgcctgccaacctggccaactccgctgctgacggcgctggcaagtggcgtgtgacccagatgccgaccgctgacggctccaccaccaactccgagaacggtggttcttcgctggctgtgctcgcctccaccaagaaggctgacgctgcttaccagttcatcgagtacgccaaccacggcgacggcgtggccacccgtgtggccggcggtgcattcccggctgacaaggcctccatggagtccgactccttcaagaacaccaccactgtgaagaacgccgatggcgaggacgttgactacttcggtggtcagaagtacaacgaggttctggctcaggctgctgagaacgtgtcctccgactaccagttcctgccctacgaggtcaaggcccgcaccatcttcggcgactaccttggcaagtcctacaccggcgaccagaagctgactgacggtatcgccgcttggcagaaggcactgcaggattacggcaaggatcagggcttcaccgtgaagtaagccttgaaccctcgctgagactgcctagctaatctcacctgatacacaaagccccgtgacgaatcccgtcacggggcttttaccgttttaagccccgcctagtacactcgtcaccatgcgagtgatcggacagcgaatcaaaagaatggcaaccatagcagtgactgccatcctttccgtatccctggcctcgtgcgggcaggccacggacgacaaccgtacggagatcagcgtatggagctgggaaccgagcatgggggaggtcatccgccgtttcgaaaaagccaatccggacatccgcgtgaaatggaccaatatctccggctacggcaatcttaataccgccattcaagacggttacggcacgccggacgtggctcaaatcgaatactatgcactgttgcagtacgcggtctccggccaattgcttgatctgaccgacaaaatcggctcggattattccaacttctttaccctcggcacatggtcgtccgtgcagctcgccggccgtacctatggactgcccatggattcgggcccgatgggcttcttctacaacgaagacgtgttccgccaagccggcgtggacgccaccaagatcaagacttgggatgactattacgaggccgccgaaaagctcaaggagatcggcgcgtatatcgccgccgactcgggcgacggcagtttctatgacgcgatggtctggctcgccggtggtcagccgttccacacgtcggccgacggcaaaaccgtgaccatcgatttggatgaggatgccggcacccaacggttcaccgaattctggcagaaaatgatcgatgaggggcttgttgacaccacctccgccacatggtcggatcggtggaaaagcagagtgggcaccggcaccatcgcctccgtgttctctggggcttggatgccgtcgttgctgctgtccaatgtgccgggcgcggccggtctgtggcgcgtggctcccatgcccacctatggtgggcagcctgccaacgccgaaaatggcggctcggcgctgaccgtgttgcaactgacccgtaagccggatgcggcctatcgtttcgtggactttgtggcgcatgacgcccaaggcattagcgcgcgtgtagacggcggtgccttcccggccgattacgccaccctgaattccgctgattttctggataaaaccacgattaccaatgaccgtggcattgaaatcccgtatttcggcgggcagaagttcaaccgggtactgtcggaggccgccgaggatgtgtcggtcggataccagtatctgccattcgaagtgtatgcgcgcagtgacttcaaatcgacggtgggccaggcatacgagtggtccggcagtttccacgcctatcagcagcgacaggaagccattgagatgggcatgaaggacgaggaaggcaacccgctcgaaccattggagaagcccggcaagaaagtcagtctctccgacggcctggcccaatggcagaaagacctccgagaatacggcctcaatcagggctttacgattaagtagggttttgagtaggtttttcggggagggacggaatcgactgcgctatgcgcggccgatgcctgcacaccgcgttacttcacattgcgcgagtagatgtatgccatgcctttgaagatcaggtctgaatcgtagacgtcgatcatgtcggtgtcgttcttgaaaatgcggctgagccctcccgtggctaccacttggaacggctcatcgatttccttgcggaactgctgaatcgtgcgctcaatgccaccgaggaacgtgtaatacagtccggcctgcatagcagtgcgcgtattggtggccagaatcgactgcggttgcgtgatctccacttccggcagctgggcggtctgcccccacaacgcctcggccccggtgcggatgcccgtggtgatgaagccggagcgaatcgtgccggaaccgtccacatagttgaacgtggtggcggtgccgaagtcggccaccagcaccgggccgccataggtgtggtaggcgccggcgcagtcggcgatgcagtcagagcccaaggttttggggtcgtcgagacgaatgttcatgccggtcttgacgccagggcccaccaccatcggttccaatccgaggaatttgatcagcgaggcgcggaaggaatacatcaccttcggcaccaccgagcagacgatcacatcgtccacatcgtcggccgtgtaatcgctcaaagccaggaactgcgtgatcatcagaccgtattcgtctgaggtgtgcgtcgccttggtggtgatgcggtaggagccgacgatgcggtcgccctccagaaaaccgatcacgatattcgtattgccgatatcgaccgccatcagcatgggtcaggcctccttgttctcgtcatcgacattgctcgcgccgccggaacgcaacgctgcgagccgcagcaacagtcgttgcgcaagcacggttttgtccatcttgtcccaatgctcgatattcggggtgccggcatcctccgctccggacgtgagcacggtgacaacgttggtgtcggtgccgaacccggcaccggcgtcgcgcagattgttggccaccagcatgtcgcaatgcttggacgtcagcttcttctccgcattacgaatcagatgctcggtctccatcgcgaatccgcacaggatctgcgagccgtcgtcgcgcttgcgttcgccggcccacgccagaatatccgggttggaaaccagctccacggtgatgctgctgcggccggccttcttgattttctccggcgcaatctcggccacgcggaaatcgcccacggcggcggccataatcgtgatatccgccgccgggaaggcgtcggccaccgcatcgaacatatcctgcgcggtcgtgacgcgcaccacatccaccgcatcgggcgcggtcaaggcgactggaccggagaccagcgttacgtcggcaccaaattcggctgcggccgaggcaatcgcataccccatcttgccggtggaatggttcgtcagatagcggaccgggtctagcggctcctgcgttggcccggcagtgaccagcacgcgcagccccttgagcggggaagatgagggagcctggtcatcctgcgcatccgccagcagccgagcggccacttcctcgatgcgcgccggctcttccatacggcctcgtcccacgtcgccgcaagccagattgccttcctccggctccacaatctgccagcccaattcggcgcaggttttcagattgcgctgcgtggccggattgttgtacatatgcacgttcatcgccgggcataggatcttcggcccctcataggccagaatggtggacgtcagcgtatcgttcgccaatccacaggcgatgcgggcgatgacgtcggcgctcgccggggccaccaccagcagattggcccaggccgcatcggccacatgattgatggtcgttggcacggtcggattggccgtcacgtcgccgtgcgcggccggataagcggggaacatcgtggtacgggtgggctgatgggtcagcgcggtgaatgtcaggggagtgacgaagccttcggccgctgtggtttcgataacccgcacctcgtggccggccttggtccaatcggatgccagatgacaggccttgaatgcggcgatgctgccggtgacgcccagaagaatatgtgccatagctgcctcccggccttatgccaaggccgcacgtgtgcccacgccagcgcttcccgcgtcgttgcccgacgatgcgccgcgtgttgtggtcgccgcggaccctccgtcggcgccgcaatccagtatagccattgcctccggcgtgtccggggatatagtagaacgtggtgatcgacccgaatgggcggtcaaccacgcaagataacaacgaaaccatattcgggcgtaagcatgcccgaatgcatcagggagtatccatgtcccagaacaatggtgtgcacggcgagtccggcgcaaccgaagacaggaacatcgacggcgcgaatcaagccgccagcaccgacgcgagcctgaacgcgcgcgcgaaatcatcaaacaagaagaacggcggcccgaaatggtggctgtggacgctgatcgcggtcgtcgtggccgcggcgctcatcgtgggcgtcaccgtcttcggagggaaaggcaagggcaaggacgcgaacgcctccggctcggccagccgatccgataccgtggccgtcggcctcaaactcgccccggtcaatcttgacatccgccaccagtcgggttcggcccttgagcagatcctcatcggcaacgtgtacgagggtctcgtctcgcgcggctcggacaacaaggtccaccccggtctggccaagagctgggagatctccaaggatggcctgacctacacgttccacctcaacgagaagatgaacttctccaacggcgacaagctcgacgccgaggacgtggcgtggtccatcaacgagctcaaggcccagaagtactacgactacgagcaggtcaagagcctggacaaggccgaggccgtggacgccaacacggtcaggctcaccctctccgcgcccaactcgaacatgctgtggtacctcaccagccgtcccggcctggtctacgacaaggacgccacctgggatcagaagaacggcgcgttgggctcgggtccgtacaccgtggtctccttcgacccgaacgacaagatcgtgctcaaggcgaaccccaagtattggggcaccgagcacaaggcgaggaccgagaacgtgatcgtccggttcctgccggacgagaacgccagcatcaacgccctcaagagcggcgacgtgcaggtgctttcgcccatctccgccacccttgccgatccgttccgcaaggatccgaactatgtggtcaagtccggtgatggttccgacaagttcgtgctcgccttcaacatggccaacgacaagctctccgacaagcgcgtccgccaggccatccgatacgccatcgaccataagcagatcatcgcctcgcgcggcggcgtggacgcccccctcggcggtccgatccccaaggtcgatcccggttacgaggatctgagcggcctgtacccgcatgacgtggccaaggccaagaagctcatggagcaggccggatactccgagtcgaagccgctggacctgaccctcacctacgccaacgtgtacggcaccgagctcggcgaccagctcaagagccagctcaagcccatcggcatcgacctgaagatcaactacgtggagttctccacttggctgcaagacgtgcacgccaacggcaactacgatctttcgctcgtggaccatgccgaaagccacgacttctacggatggaccacgccgagctactacttccactacgacaacaaggacgtgcaggccctgtacgccaaggcgctggaggccacctccgatgacgaggcctcgaagtatctggccaaggccgcgaagatcgtctccgaggacgcgccggccgactggctgttcagctggaaggtcaccatcgcctacgccaagggcgtggacggcttcccgcagaacctgagccagaccgtgctgcccctctggcggatcacctacaccaagtagtcccggaacccatcgctcgggcgcggcgcgggagcgattccgctgcgcgcccgaccgtggacggcccatccggccggtgacgccacgggcggtggcgagggaatcgataagggaggcgttatgcggttcttgatgcaacgcttgctgctgttcgcggcggcgctgttcggcatttcggtgctggtgttcgcgatgctgcgcatcctgccgggcgacgtggcggtcgtgatggccggcatgaacgcatcgccggcgcgtgtggcggccctgcgcgccgaattcggccttgaccggccgtatgtcgtgcagtatctcgactgggccggagggctgctgcacggcgacctcggcgtgtcggcgctgaccggtcgggcggtgacctcccaggtcggccaacgtgcgacgatcacgttcccgctgatcgtgatgagtctggtcatcgcgctcaccctcggcttgtccatgggcgccgccgccgtgatctcccggtcgccggccgtgcgcggtttcctgcgcgtgctgtccatcgtgggcggcgccgtgccggccctgtggagcggcctgctgctcatcctcctgttcgcacggggcgtgggccttgtcggtctgctgccctcgcaggggttccccgccgctgggtggggcgctcccgggcgggcggtctcgtccctgatcctgccggcgcttgccaccggattcgtgtccggtgcgggcatcatgcgttacacgcgctccattctggaaggcatcgccgatgagggaggtccgatcgatatggccatgtcctgcggcatgacccgcacccaggcgttgctgcgcgtgggattgagattggcggctccgcaactcgtctcggtggtggggctggcgttcgcctcgatgatcaccggcgtgatggtggtggagaacctgttcgccctgcccggtctgggcgccctgctggtgggcgatgtcggcaaccgtgatctggtggccgtgcaaagcgagctgttcctgctcgccgcgttcttcctgctgatcggcctggcggtggatctgctgcacgcgctgcttgacccgcgtctggccgccggaaaggaggaatgatggttgatcgcaatggtcgatggcgtcgttcgggcgtggttctgggcaccatctggtcccgtggcaccggccgctactcgctgatcgtgctgggatcgtggatggtcgtcgccctggtgtcgttgttctggaccccgcagtcgctgctggccaccgacggctaccacgtgtgggataagccgtcgtccgcgcattggctgggcaccgacggcaccggcgcggatgtgctgagctggctgatggccggatcgcgcacgaaccttgccatcgccctgctcaccgttgtctgctcggctgccatcggcatcctactggtcgggctgatggtcgcccgttcttcggcgctcgcttcggcgtcggtcgccgtggtcgacgcgctgatctccatccccaccgtgctcatcgccctgctgctcgccgtgccgttcggcgcatccgcggccgtggtgatcggcgcgtgctccatcggctacgggctgcatctggcgcgcgtcgcccgtccggccgccctgctcgccgcccgctcgggatacgtgcagtcggcccgggcgaacggtgccagtgggttcggcgtactggtcagacacatcgtgccgaacatcacgccggtgctgatggtgcaatcgtcgatgtcggcgggcacttcggtgctggccgaggcgggcctgacctatctgggcgtgggcgtcggcgcgggggtgccgagctggggccattcgctggccacctcggtcaaactcatcaacgtgtttccgttgacggtggtgtggcccggtctgatcgtcaccctggtggtggtcgcgctgaacctgttcggcgacgcgttgcgcgacgccaccgacccggtggctaatcccgcgttgcggcagatgactgtgcccggtgcggttgtgccggtggctaggggagccggtgacactgcggcgcagtccgcagtggcagcgccgaaggagacggatgatgagcgttgaaattcacgggctgaatattgctatcggcggcaaaccgattgtcatggatgtcgatctgtccatcgcggacggcgaacgggtcggcctgatcggttcctccggttccggcaaatcgatgatcgccaagtcattgctcggcctgttgccgcgcgaggccgtgctgtccggcaccatcacgatgggagaaaccgccatcctgtccggagaaaccgccgagtcgcggcatgggcaggaagatgactcaggatctgacgaagaacgcggcgcggcagataggcaccatgttgccggtgaacgcagggttgccacctcgggccacgattccgccgcgtacgccgacgagcatacgcttgccgatctgcgcggccggtatgtgggtacggtattccagaatccggcccatgcgctgaacccggtgatgaccgtggcgcagcagattgcgttgccgttgagactgcactacgatctgaccaaggccgaacgtgctgagcgagtgaataccatgctggacaaggtcggactggaccgtgacgtggccggcacatacccgcacgaactgtccggcggccaacagcagcgcgtgggcatcgccacggcgctgatcacctcaccgcgattcatcatcgcggacgaacccaccaccgcgctcgactccatcacgcaacgtcagatcgtggacctgctgacctcgttggtggacgacgccggcgcatccatgctgttcatcacccatgatttctccgtactcgcgcgtgccaccacccgctgctacgtgctggacgccggccgcatcgtcgaatccggacccaccgccgacctgcttgctgcaccgaccacgccgcaagcccaacgcttggtcgccgccgcccaaaccctcaccctccacacccccaaggaggattcgcatgagtaacagcagtgtgccactcctctccgcccactccatcaccaaatccttcggaccgcgcaccgcacgccaccaagtcctcttcgacgtctccgccgacgtccacgccggcgaatgtctggccgtgatcggcggctccggatccggcaaatccacgctgacccgcattatgctgggcttggaatccgcggactccggcagtgtggaatacgagagccaatccattgtcggcggccgaaaatcgccgggattcgcgaccctgcgccgcgaatcgggactggtgttccaggacccgttctcatcactcgacccgcgttggcaagtcgccaaatcggtggctgaaccgctgagtctgcagcgacgtgatctgaacaacaccgatatcgacgagcgggtggtcgcggctctgaccatggcgggtcttgaaccggcggacttcctgaaccggtacccaatcgacctgtctggtggccaggcgcagcgcgtggtcatcgcccgcgccatcatcaacgagcccaaggtaatcctcgccgacgaaccaatgagcgccatcgacgtggccgcgcgcatccagatcctcgacgccttcgccgctatccgtgaggcccggccgagcaccgccatcatcatggtctcccacgatctcggcgtggtgcagcacatcgccaaccgcatcctcgtgcttcacgacgggcgcgtcgaagagacgggtcccaccgccgaagtgctcggcaacccccaatccgattacacccgtcagctcatcgaggcagcctcgttatagacctttttggctcccctctctgaggggagccggccgccggcgacacgcgcttgtcgcgggttgtgctatggtgtgaggcatgcagattatctcatgttgttgtcgctaaccgacgcccctgggcgagcggtcagtgacgcataacttgagatggagcattcgaatcgcggcgaatctgccgcatacttttcatgtatccgatggcacaagcgtaatcgtgtaatgcgcgagccgtggttaacatgaaaaaccggttcacttttcggattcaccgtacagtgagcgggaatactcgattttcaaaccaaagccacagtccattcgtttgggaacgtcggttcacgaacgcaacgcagcaaaacccccacaaccccagcaacgaaggacttcacatgaccatccacaacagcctcgcagaactcatcggcaacaccccgctcgtcaagctcaaccacatcccgcaggcggccggcgtcaaagccaccatcgccgtcaaagtcgaatacttcaaccccggcggctcctccaaggaccgcatcgccgagcgcatcatcgacgccgccgaacagtccggccagctgaagcccggcggcgtgatcgtcgagcccacctcgggcaacaccggcgtcggcctggccctggtcgcccagcagcgcggctaccgcacgattttcaccctgccggacaaggtttccgaatccaagcgcgcggtgctgcgcgcctacggtgccgaagtcatcgtcacaccgaccgacgccggcccggacgacccgcgctcctactaccaggtcgccgaacgactggccaacacgattcccggcggcttccgcccgaaccagtacgacaacccgaacggcccgctgagccactactacaccaccggccccgagatctgggaggctacggaccacaaggtcacgcacttcgtggccggcattggcaccggcggcaccatctccggcaccggcaagtacctcaaggaagcctccaacggcgcggtcaaggtcatcggctccgacccggaaggctccatctactccgcttcctcacgcgacgaagtccaccagtacgacatcgagggcgtgggggaggacttctaccccaaggctttcgaccggaacatcaccgacgacatcgtgcgcgtatccgacgccgaagcctttgaaatgacccgccgtctggccggcgaggaggcgttgctggtcggcggctcgtccggcatggccgtggccagcgccatcaagtacgcgcttgccaatgatttggacgagaaccagattgtggtggtgctcgcccctgattccggccgcagttatctggagaagatcttcaatgacgactggatgcgtgccaacggctacggcgacatcgtggaacgcaccagcaagccctccctcgccgagcagtaccttaacggaactccctctgatgagggagctgcggatggactccataactagctatcaaaagaatcaataccaacatccgcactaactaaccgcacctgttttaccttcgaatacggaacaatcccgaaaggaacccaatatcatgtccgctgaatacaacgccaagttcgccaacaccgacatcgccactcgcgccatccacgccggccaggagcccgacccgaccaccggtgcggtcgtcacgccgatcttcgccacctccactttcaagcaggatggcgtgttgggcctcaggggaggccacgactactctcgctccatcaaccccactcgcaccagcttcgacgagcagctcgccgccgtggaaggcggcaagtacgcgctgagcttctcctcgggcttggccgccatcgacgtgctgctgcgctccaccatcaagcccggcgacaacatcctgctcggcaacgatgtgtacggtggcacctaccgcctgctctccaaggtgttcgtgccgtggggtgtgggcctcgacgtggtggacatcaccgatctgaaagccgtggaaaccgcattggcctccaagcactaccagtatgtgtgggtcgagaccccgtccaacccgctgctcaacatcaccgacatcgcggccaccgccgaagttgcccacaagtacggcaccaaggtcgcggtcgacaacaccttcgcctcgcccgcccttcagcacccgctggccgatggcgccgatgtggtggtctactccaccaccaagtacatcggcggccactccgacgtggtcggcggtgccgtggtggtcaacgacgaggagacccgtgagaaggtcgccttcctgcagaacgccgccggcgcagtgccctccccgttcgactcctggctggacatccgcggcctgaagaccctggatctgcgcgtcaagcgccacagtgccaacgccctgaaggtggccgaatggctcgaatcccagccctctgatgtgattgagcgcgtctggtacccgggcctcgagtcccacccgggtcatgaaatcgccgcccgccagatgcacggcggcttcggcggcatcgtctccgtgcagctcgcggccggtgccgaggcggccaagcacttcgtggaccacacgcagatcttcacactggccgaatcgctcggcggtgtggaaagcctcatcgaggtgcccgccgccatgacccacgcctccgtggccggcaccaccctgcaggtgcccgccaatctggtgcgtatttcggtcggtatcgagaacgccgacgaccttatcgccgatctcaagcaggcgttggatcgtatctgaccgtactgacggtactggtggcaccgtattgacggtgccaccacgcttatcggcggactcgctatcgattggtacctacaaaaaatccccggcccacaagggtcggggattttccgttatcgattaaacatggatcgaatcagctggcgttgccgccctgccatccggtggcatccgcaccagccgggcgcaacgcctgaccggaagtcggtgtggtgccatcaacgaccacacgagtgccgatggtggcgaagtcgtacatccacttggcgtcggccacctgcatgttgatgcagccgtgcgagcctgggataccctgctgcacatagatggggtgctcgccccacatgtatgcaggaacaccgtgcagagcctcgccgccgttatagtaggaaacccacggcgtgcctggctggttgtagccttcgccaaccatggtctgcgattcgtacttgagatacacgtagaacgtgccggtatcggacagcatggaaccatcggcggtgggcttgccagaagcgatgttgaacttcttgaccaccgtggtgccctgatatgcagtggcagtctggttcgtcagatcaacatgaacccacttatcgccatttgccgtatcgaagttatgaggcacctcgacctgcttgacatcatatgggctgtctttcacagccacagtggaatcagtggactggttctgctcgatggcggtagccagacgttcgggggcgtccccggcaccagtcacttcaataccatccacaccgagtgtcttatcggcaccaatttccacgccgccttcgtctttcggcgtgatgtagacctcgcgtgtcaccttgggaacagtcagttctttggttacgctgtcactggtgacgtacttggtgatggcatcgcggtcgactaccagactcatggtgccacccgccttattcaccgtgggcttgaggaatgaggcaatggtatcggccgggatggtgacgctcttgttcacgccgttgtccacggtcagtttgaggccaagcttggcattggcgtcaaactgtgtttgctgtgcgctcgcgtcatcaatcggattctttgcagtctgtagcttgaccggcaccgtcgcattttcgcccggggtcgcgacggcctccttgactgcagcattgacaacattgatatccgggcccttgccatcctggcccgcggtgtaatcgaactgcttggtgctcttgttgtagacaacggtggcaatctgcgctcggtcggcctcatcgaccaggccggcggtgacgaattgttcggcagtctctttgtctctggtggcggtcagagcgatatgcggctgatcgaaaatattgagcttggccacgtcgccggtcttcgcgttcaacagcgcatctacggttttatccgtgtcgacggtgacgccaaggtccttcagcgaggctttgacgctgttgccttcggcggtgaacgtcactgtggtgttattcagctgctgcttcacagtattcgcaagttcttcgcgggtctggcccatgacagagacattgcccaaatgaacaccgggcgcagccttgtcttggaagtaccaacgtccgacgaagaaataggctattaatgcggcaagcaacactgcaaatatggttatgatggcaatccgtgcggccttgccatgtgatttagcggtggtagatgccatgacatgttcacccac

SEQ ID NO: 2986 - DNA, 3664 bp, Unknown
  R19_24m  MAG No. k141_11437
ctgctcaggcaggttgagcggacccatcgggccggtttcgccgcccttggagcccttgccgttgtatgcgagcatttcggacggccagatctgggagtggaaggtgatgttgtccttgcccatgaagtagtaggccgggcagctcggatcgttccaccattcacgccacttctccgggtcgccctggcggcgggcccattcgatggaggccgacaggtagccgatcacggcgtcgaaccacacgtacagcttcttgttcgggttgtcgatccagcccttcaccggcaccgggataccccagtcgatgtcacgggtgatggcgcgcggcttgacctccttgaacaggcccagcgagaagttgatgacgttggtgcgccagcccttgcgggtctccagccatgccttgttggcttcggcgagcgccggcaggtcgaggaagtagtgctcggtctgctcgaagcgcggggtttcgccgttaatcttggagacggggttgatgagctcgtccgggtcgagctcgttgccgcaggcgtcgcactggtcgccacgcgcaccttcggcgtggcaaatcgggcactcgccctcgatgtagcggtcgggcagggtacggccggtggacgggctaatcgccacctgctgggtgcccttgtagatgtagccgttctccaagcactgcttgaacatctcctgcaccacgtgctcgtgattgccggtggtggtgcgggtgaacaggtcgtagctcaggccgaggtcgcacagatccttggcgatcacgcggttgtaacggttggccagttcctgggcagtgaggccttccttctccgcctcgacgagaatcggggtgccgtgctcgtcggtgccggacaccatgagcacgtcattgcccttcatgcgctcgtagcgcgcgtagacgtcggagggcacaccaaatcctgcaacgtgaccgatatgacgggggccgtttgcatacggccaagcaacattcaccaaaacatgactcataaggcttgattatccggcgcggcggggacacgcccggatagctgccgcgccgccatcctcatcccactcacctatccgcccgtaacttcccccacatacttatccgtacaccgcttgcgcgcttatccgcatacgcattcgcacacgtatccgtacgtgcatccgtacacacgtccacgcacccatccgtacgcacgtccacgcacatccgcacacacttccgcctgtcgatatccaccgagttatccacatcattcgcgcacctagtgaagttatgcacttatccaccgttttcgcttatccggtggcgcgcaagccgtacttctgcatattgttcggtcatggatatcacagcaggtccgatgacggacatcacaacagtcacctcgccggcaaccgcgcagcccgcggtgccgccgatactgtttaccaaggatctgccgggaccgctcagccttaaccgtctggccgccttcggcgcgttacgtaagctcgacgattccgccggctactggatcgagcattcgggcacactgtatggtcgcgcaaaaatcgtcgcggaggtcgccccgtttggcactgtggtgtgttcgatgaccgccgcttgggtatggctgggaggccccgactttccgagcaccatagacgtgatctccacatcgcacttccgctcggcatccgtcagccgccgcatccgcgtattcaaaagattgacgttgccggagcaaatcatcaagctcggcgggctgcctgtcaccacgccagcccgtacggcttgcgacctggtgatgagtcctgaagacatccccgatccttccaccgtcaacgcactggtgtgtcagctgatgtccgcgtaccagtttcggccaaacgactgtctacaaatcgtcaaggagcatcggcatcacaagtatgccggacgcgcacgcatgttttttgaatcggtgcagaaggagattgacgaaccggctttggagcaatgcgcatgacgaggggattcattgccagaggccatcgcagaggccgccatgccgctcaccgtttacggcatttgcggcaggcgcaacggttgcctcgccacgcggcggcggcacactcatccgaatccgcatcgcgcgcaatctcggatatgaccgcgccgcctgaaccacccatcagacttacgcccgcggtggcatgttcgcccgatacggatgttgccgtgctctggcacatcgcatatcacgtgcccgaactgcgtaaatggctggttgccaatcccaaagccgacgcgcctttgctggaattggtctcgcagcgtggtgggcccggggtccggcaggcgttggaaatattgttcgagtcgatggaagcgtaacggggagataatcgccggctgctgcgctatcccttgattttcagcacagccgcatacacctgcttgcgattggccaacgatccgtcagccagtggatgctcctgcaccacttgcgcgatggcgtccttgatacgcaggccgtcctccaaagcacggtcgatggccagcacggccatgtcatccacgctcaacgtactgggcgcggccgcttcggcctcctcgttggacgcgccgccgacgaccagcaccatctcgccacggggcggatcatcaatcacactttggcgaatctcgccaatcgggccgcgacgaatctgctcataatccttggtgagttcgcggcacagggccatcgggcgattcgggccgaacgcgtccagcagatcgtccatcgaatcggcaatgcgatgaggcgtctcgtagaacacgatggtgcggcgttcgggcaacagcgtgcgcagatactgcacgcgctcggaatgctttcgcggtaggaagccctcgtagcagaaacggtcggtgggcaggccggagagggcgagcgcgtcgagcacagcggaggggccgggcgcgcaggtgacgggcaggccgcgttcgatggcacggcgcacgatggccaagccggggtcgttgatggtgggcatgccggcatcggacacgacgagcacggtggcgccggtttcgacctggtcgagcaggccgtcggccttgtcgcgctcgttgtggtcgtgataggcgatgacgcgaccgttcacatagacgccgaggcgacgggcgagatcgtagaggcggcgcgtgtcttcggcggccacgatatcggcccgctccaagagggccaccagacgggcggaggcgtcgccgacgttgccgatcggggttgcggcgagcaccacggtgccggcggggatggtcacggccgattcgcgggattgggtggcggcggattcgccggcatgaacttcatcattgcgttcaggcacttgcgtcacgctaccgtcagcgtcatactgctcattcaactcatctgcgcttgtcatactcccagtattgcccataccacagagcaatccacgacaatccatggcggaatcgaggcattctccctttgcaggggctgatttcacatgttccggaagtctacttccgtttcaaggggctcctcatccggtgaagcaccagtacaaacggctttgacgcaacgctattccgccattttggcggcatatctacttgaccatcagcccctcgaaacgcaagtagacctccggtaaaccccaaatcagccccttgaaacgcgagatggca

SEQ ID NO: 2987 - DNA, 9035 bp, Unknown
  R19_24m  MAG No. k141_11453
cagtcgcgctcatctcgtcgtcacctgtgccttatttctgtgtccgtgctcgccactgtttgtcagcgatgcagcagcttgtgtgcggcttcggatacaccgaagcgcagtccgtccaccggcagcgtgaacttgcccggaagctcttccacgaatccgccgaagcgagtcttgaactgccagacgccgtaggaaggatcgttggcgtcgaaaatgccggaaatgccatagaagttgaagcgctccacgccacgggcgatgcagtcaagcatcgcctcgaagtggattagggaagacgggtagtaatccatgaaacgatcgtcctcgccgctggacaggcagacgacctcgttcggatgccagaagtagacaccggcttccaccggaatgaccggaccgtccgaggcgatgatgccattgacttcgccgatggtcttttccagcgccgcaatcttcttgtctgcggtggcgatgcgcttttccagcgttgccgggtcggaggcacccttcttggccgtgccttccggccgctgttgcgcgcgctggagcaggcgttcgaggttgcgcttgtctttggaggccgcattcagcttggattgcagggtgtccagatattcgtcgaaatgggtttcgaccaccttgaactcgatcaggtcgccgaaggtatcgaacagacgctcatagtaggccagatcgcggctcttgaagccttgacgtgcggcgctcatatcgcacagcttgacgaaagtgctcagttcgccgcgttccagccggcgcacgcgcagaccggaatcctgggcgatgcggatgttcttacggcggtacttggagaacgaggccagcagttccttctcattatgaatgccgtcaagccccttgacgaagttccagcggttcaccacggattcgtagcccacggtgaagccgccatgtttccaaccgaagcgggccatgttgtccatcatcgtggtgtccgggtcgctggtcggcttgccgtccagatcatgcagacggtagactgcggccggccagcaggatacgctgatggcgtgatgggccttggccgaacgacgcaaggcttcggtcatcgcctcaaccacctgtggattgtcataatcgcacagcggtccgcaccagactgagccttccaaaccgaaacgggaccgcgtgtacaccacgtagcaggcggcaatcagcttgtcaccgcgcttgacacccacatagtccaccggaccgttgaacgcacccatggcggccatctgcgaggtctgctggaaactaccttgcacttgagctgcggagaacgcatccagctcggcaggagtgatcttggtaggggtgagcgaggcgacgcctgcatcggattgcgtcataatcgaaccttcttacttgtcgttactctgatcgttactctgggctctggaatggcctgtgtgctgcgtccgtttaccgcgacagcagcttgtgcgcaaattgcttcatggcataggcaaccggtttgaccggcagcacgaactcgcccggaagttcctcgacatatccgttgaagccctgcttgaactccagtacaccacgaccctcgtcatcgggatcatcaaagacgccgtcgatgccgtagaagttgtagcgagacagcccgtgttccacgcagaaatgcagcatcgcttcatgctgaatcagcgcggaggcgtagaagggcttgtactgctcgacgctaccggagaacaggtagatgacctcgcgcggatgctccacgaatagtgatgccgcagccggcagcacatccccgtctttggcgaactcggccgcctcgttcaggcgcttttcggctgccgccagattgcgggtctcctcccccagctgacgttcggttttggtggtggggtgttcggcgtttttggcggtcaatgccgccaccttggccgaaagcgcttcacgcttggccgtcatgtccgctacatattcgtcgatgtggatctcggcaaccataaaatgcgccttgttgccaaacgcttccttgaaacggtggaaatatgcttcgccacggtattcgaagctacgacgttcggcggtttgctgctcgattcgtgcgaatacccccaactcgtcgtccgacagctcacgcacatgcacacccatcgattgggcacgcttcacgctccactgggtgcgcttgtcataggacttcagcagacttttctcatcggtaatgccggtcagatccttgaggtagcgccaacgtggaaccgccgtgtagcccacggtgaaaccgccatgagtgaagccgatcgcctcgagccgttctatcagcttattgtcgggagcgccgttctggtcatccggcaaagaagctccattggtgtcgcgaaaccgatacggggattcaggggtgatttccagctgtgaagcaccctttgccttggcatggcgtttcagcgcatccatgaagaaggtcaatgcttcggtgtcgtgatagtcgcacatcgggccatcatggatggccgcaaatgtagagaatcgagagcggtgagtttcgaacagcgccgccgcgacgatcttctcgccctccttgagggccagatattcgacgtcgatcccctgcgcggcgcgaaggcgtcccatcgccgaggtctgttggaaattgccttgtggatgcctggcggagaaatcatcgaactcttcgtctgtcaacttcaccagcacaaaatcacgcatgcttccctctgcctccgagtcaatcaggctcaccatgctagcataacgcgcacacgacgaatggggtccgagcagatgaggtgtgcacatcgttcgcactattgcctccacaatggctcaaagaacaatggcccgaagatgctgaacgtccggcttgcgttgaatcaaacgcagtgctatattctctacttggctcttggagccacgccaccttagctcagtggtagagcatccccctcgttcgtgggaaggtcggtagttcgattctatcgggtggctcttgttcatcaagaaggccgacgcactaagcgccggccttctttcgtatcgcccttgctaggtcataggcgcttgctagacacttgcccgattcgggaggggctgagttgctgagccgcgactcaactgtggcttagtcgcggctcagtgcagttagacagcctagacgacttagtgcagcagcgcctcgatagcggggaccaaggctttcagcgccttgcctcggtgggaaatcgcattcttctcggccggagtcatttcggcgctggtcagcggctcgccttcatggtcaggctcagtgctgacgcgaccggcaggctggtcgtccgggacgaacagcggatcgtaaccgaaaccgtgttcgccacgagcctcgcggatgatacgacctggcatgtcgccgagttccactgtctccgacttgatggcgtaccgggcatgcaccggggcagggctcccatctgcagccgtggtgtaaacggtgatgccgtcggcagccactccaccggtcacgtcggcactggcctcggtgtccgggaccaccagcgcggcggcgcagcggaagcgcgcggtacgcttgtcatccggaatatcttcgatttgggcgagcagcagcgcattattggccttgtcgtggccgtgagcacccgcccagcgagcagacagaatgcccggagcgttacccatcacatcgacgatgagacctgaatcatccgctacagcgggcagaccggtacggatggccacggcgcgggccttgagcagcgcgttctcctggaaggtgacgccggtttccaccgggtccggcaggtgaaggctaccagcggacaccagttcgatgttttcggcatccgcgccaagatcctcttcgagaatgcggcggatttccacaagcttgccttcgttatgggttgcgacgacgatttgcatgggttctcctttaagaaggctccccttgtcaggggagctggacattgcagaccgtacggcttccagccgacaacctcccctaaaggaaggggagctggcttagtctagggacaaagcggcacgctgggcggcttgcagttccttgttgcccttttcggccaagtcaagcagggtgccgagttcggcacggttgaacggacggtgttctgcggtgccctgaatctcgatgaaggtgccggaaccggtcatggccacgttcatgtcggtcatggcctgactgtcttcaatgtatggcaggtcaagcatcggggtgccgttgatcacgcccaccgatacggcggacacatagtccttaagcacgcggctggcggacttgatatggcggtgcttctccgcccaattgactgcgtcgaccaaagccacgtacgcaccggttacggaagccgtgcgagtgccgccatcggcctgaagcacatcgcagtcaagctgaatctgattttcgccgagcgccttcatatcgatgacgccacgcaggcagcggccaatcagtcggctgatttcgtgggtacggccaccgattttgccacgtacggattcacggtcggtgcgttcggcggtggcacgcggcagcatcgagtattcggcggtgacccagccgaggccggagtccttgcgccaacgcggcacaccaggggtaaaagtggcggtgcacatcacgcgcgtgttaccgcattcgatgagcacggagccttcgggggcgtcggtgaagtggcgggtgatgcgcacggggcgcagctcgtcgaccttgcggccgtcggcacgaattatttggtgattgccaagcatgtctttgatttcaaccatgcgccccagcatacgccatccgctctatgcctggatagcaactcgtcaaccatcatcaaaccccagcgcaatgtcattccctgcttacatatccattccatgacacttggctgcacgccactattttcttatgcaccactcgcttacagagtcaatgcctgcgtacctgatgaggattgggaaagatcgtccgctggaataagaatgccatattccatgaaatcttggttgaattgcttgcgctgcatagcgttgagttcgtaatcgattaacggcaaatatgtatagtccatgtcatgcaacggctcttcatatcgatgaagcacgtgcataattgccgcgctcggcagtggggaccaccatccatccaagccataccggtacggaggaaccaatgtcaagcgtctgttccttgggttgatatcccaacgcagaaaacggtataaaccagcgagaaacgcaatccagcacgcatcgttcacccgtgcaaccgctcggacgaacgatatacgttgatgttgaacattccgagcatgaatcagattgacgcagagcatcttcaacgtagaccaggtcgctccgctttctattgcatcgaaatcaggaggcctacgcagttgcgccaacaacatatgcaattcgtcttccggaatcgtttgcgagggggccacggcttctaggtgaagaccaaaaccagcccgctcaagcccctcggccaaaacatcaaacaacatacctctttgcccacgcaatacgcgaccaattgcagaccgatccaaaccagtacgctgtgcaagctcataggcattccaaccagtctgcgacatcacttcattcagcacagccgcacacgaattaacagggcaaccagataccacaccgtgatgcacgacatcgcactgttctaacgctcgatgctctacagcgcgccgctctgatacgtcatcgttgcccgccgcgttctcatcattgagagtttcactcatcgaagtcaccttgcctcggccgatttcccggtcatttcatcaaaccgcaatcatcatatcccacaatcccatgacgatacgattcgtcatatcccacaattcagagacggtatgattcgtatcgcatcagttcacacgattcttcaacgattgctccgcaaacgattgctctgcacgcatcacggcattctatcggcacactattcctcccaatcagcccaacgcaacatcacacgcaacatcacacgcaacacccctcacgcaacacccctcacgcaacacccctcacgcaacactgcgccatctctgtaacatcaccgacaacacggcaatcccacaacgtctcggtgcaatatcctctgaaatggtttggtttttcactccacctcgtcggcatcctgaccaggataggaatatgtgtcgttccgcaccatgtacaaaacgttgtcaactgacaacgttcttcaaatcaattggataagacaaatggccatttcccgccaattcatctgaatcaagacgttgtcaactgacaacaaaatgtacattgcaacagcatgcacatatacatatttccccggtgaacagtacccccccccaaaaaaaaacaggggggccaccctcagctggaaccacgtccggcgaaccgggacgcagttccgcccgaggggacgcggccaatacagccccgggacacagccacagggggtgcaaacacgggggtgcgaccggggttggatctccccgcctcggcggcgaccacaggagtgcggccaacacagacagagggacacagacagagggaagagtagccaatgtaaccaaagggatgcggccagtgagatacggtcagaggactttggtctctgtggtcgaaccgttaagcggacagcccagtgggctgtccgtaggtaaggggagcagctatgctgcgacggattcctatggagacgaaagttctcgtcagagaacctgagtctccgtaggaatcactggctcgcccttcatgaggctctgcgcggtgatgggcagttcggacaacgccttggcgtggtagtcgtgggcggccatgatggcgtcatggccctgccactgagcgtcgatctgcccatgatccacaaagccgaccagcaggttcttccacgtcggttcaggcgtgaaaccggccagcttctcctccgagccggaaatcacgtgttcggcttcggctaacgcgtattcgtaggagcggaatgccagtttgcgaccgggcactgtggccttgtccttggatttcttcatgaccggaaccatcgtgccgtcagcgccttcacgttcggtgagcttgtacaccatcgcacaagtgggagcgccggagccggtgaccagcatggtgcccacaccataggagtcgaccggcgcggtctgcaatgcggcgagcgcgtactcatccaaatcgttggtcacggtaatggtggtgttcgtggcacccagggcgtccagctggttgcgcacacgctgggccatggcggctaggtcgccggagtcgatgcgcacgccacccagttcgggaccggccacttcgacggcggttttcacggcttcctcgatgttgtaggtgtccaccagcagcgtggtgttcttgcccaatgcctcgatctgcgattcaaaggcgtcacgctcggaatcatgcaccaacgtgaagcaatgcgcggcggtgccgatggccttcagaccatacagctgggcggccagcagattggcggtacccttgaatccgcccactacggcggctcgagcggcggccacggcggcccactcgttagtgcggcgtccgcccatatccatgcaaggacgatccttggctgccgacgccatacgtgaggcggcggaggccactgcggaatcgtagttcagcacggatagaatcaacgtctccagtagcgtgcattcgccgaacgtgccttcgacctgcaaaatcggggagttcgggaagaacatctcaccttcgcggtaaccgcgaatcgtaccggagaagcggaagttctccagccacttgatggtctcggggcttaccacgtgacggtcggccaggaacttcaggtccgcttcatccaagtggaaatgttccagcgcatccagaatgcggccggtgccggccaccacgccatagcgacggccttcgggcaggcgacgcgtgaacacctcgaacacgcatttgcggtcggcggtaccgtctttcagagcggcgtcgagcatcgtgtattcatacatgtcggtcatcagagccggcgaataatcgaccattgcaaggcctttcctacataagtggtgaagttgcacctaagtgtagtccgggcaaagccatacagcccactggcgaagcggtagactcgatgcatgagattcatcgtggcgttgtggcgctttgcgatcgccggtttctgcttcgtgggcacatatgaggcatggtccaaaccgcagttctgggtgtatttcacgttccagaccggtttcgtgctgggcatcgtgatgctgtggtccggcgcggccacactgctcaaaggtattcagccgcctgcatggcttaaggggtgcctgactgtgtacgccatagtcaccgcactggtggcgttcttcctgatgcctccggacgacccggcatacgtgccacaggttattggcatcatgaccaatacgatgctgcacaaaatcgccccgattatggcggttatcgatttcgtgctattcgacccgcaccggcgtttccgctggcattacatgttctcgtggctggcgtacttccctgcatacttggtcttcgtgctggcccgtgcggcgatttggccggggtccggaccggcggccggcggcagtccgtatccgtacgacttcatcaacctcgacgcactcggctggcaagggttcggcattagctgcggcaagctggccatagcgttcttcgtgatatcgctcgttgtctggctgctcgaccgcgcactgccgagcaaggccttactcggatagacgcgcccacgatcgacgcacatcggtcttagtgcccagccggcatccagctcagcactcgatggcctcagcattcaatggaataggcgcggtttttgtactcgcgccaatccggccagtcttcaccggcgtagagggctgcatatggaactgcgtggccacctgacgaatggtgtaggacatcatgactccttactgcggcgacacgccgaagcgtcgcagccgtttgcattcaagttcacttgaactggaacc

SEQ ID NO: 2988 - DNA, 11564 bp, Unknown
  R19_24m  MAG No. k141_11542
gacggtaacgtgccgatgctttaataggcacaaggcaccgctcctcaacaaaagcctcaaagcattcaccacgcccaaaggccctcaagagagctcgcccaccatatgcgccacaggccgcatacaccacatagctggtcacagccattcaagagaaagacagaggttcatcgtgcagttgcgttccgattcccgttcccgtctcggccgattggtgaaagccgtcgccgttaccgccgcgctggcgctgagccttgccggctgttcctcaggttccgacaacgcctcaacggatggccaaaatgggtatggcaccgcgagcgtgcagctctcctggctcaagaacatgcagttcgcgggtatgtacatggccgattcgaacggctattacaaggatgccggtttcgacaaggtcgatctgatttcaggtggttcctccgcgaccagcgccgaagcggccgtcgtcagcggtaaggctctggtcggcgtcagttctccgctgatcaccgctccggccatcaacaacgaagacgcctcgctgaaggtcatcgccgcgctctatcaggtcaacccgttcgccatcgtgtcggccgaatccaagccaatcaagtcggccgacgatctcatcggcaagaagatcggcgtgagcgactcgaacacactggtttggaacgcattcctcaaggccaacaacatcaatcccagcaaagtcgaaaccgtgccgttctccgacacgagcatgctgaccaccggtcaggtggacgggtacatcggttacacgaccaccggtgcggccgcactcaatgcatccggattcaaggcgaccgaactgctgatggccgatgccggtctgcccatggtcggcgaaacactcatcaccacgcaggacaacatcgacaatcgtcgcgatgcgctcaaggcgttcctcaaggccaccatcaagggctggaaggacgcattgtccgaccagagcaaggccgtcgacctgacagtgaacgattacggcaagagccaggaatacgatccggaccagatggcgctgacgctcaagcgcgagcaggcaataatcgaaacggacgagaccaaggccaatggcctgatgaccatcagcgacgacctgcaggaaggcaccgtcaagacgctcgcctacgcggacatcaagaccgacaagggcgcgctgttcgacacgtcgctaatcaacgaagtctacaaggaaaacgcggatctcaaatgagcgttgaagatgtgaacgagctcgatggctccggcatcgccatcgagcatctgaacaaggaattccgcgtcggaaccggcaggaccttccaggcgatctcggatatcaatctgaagattcccgcaggagcttttgtctcactgatcggcccctcgggttgcggcaagtcgaccgtgctgcgtattctcgccgggctcgagacgcccacctccggaacggtctcggtcaacggcgccaccgtcacgcccggttcccccgcggccggtctgggcatcgcattccaggattcggcgttgctgccatggcgttccgtgcgccgcaatatcggactgccgctggaaatccagaagcgcaaggacgacaaggtggtcgacgatctcatcgagctcgtcgggctcaggggattcgaaaagtcccgtcccggccagttgtcgggaggcatgaagcagcgcgcttccatagcccgcgcgctgacggtcaagccgaagttcctgttgctggacgagccgttcggcgccttggatgatatgacacgccagcgtctgaacttcgaactgcagcgcatctggatgcagcgttcggccaccacgctgatggtgacgcacggcatttcggaggcggtgctgctatcggattacgtggcagtcatgtcaacgcatccgggccgtatcgtcaaactggtacgcatcgggctcgaacgcccgcgcacggcggagacgatgcgctccgcggaattccatgaagcggtggactacctgagttcgttgctgttcgatcagcagcagacggcggacggccacgccgacgacggggagcgctgatcacgcatgctttcctcgattcgcatgacgctgcgcaaaccgtgggtcggcggcaccgtgggcatcgtccttctgctggccgtatggtgggtctccaccacgagccatgagaactctgccttcccaaatcccgtcaaggtcgcgcgttccgtagtcgatgacggttggggtttctacagcgcgaacatcggcagcacgcttggccgtgccggatggggatacctgatcggcaacctggtcgccttggccttggcctccatcgtgctggtgttcccccgcttggaggaaatggtctcgcagatgggcgtgatcacgaactgcctgccgatcactgcggtcggcccgttggtcatgatcatcttcggcagtcgcgtctcggccattgtgctgtctgcgatgctggtgttctttaccacactggtcggggctctggtcggcctgaaatccgcatcgcgcaccatgcttgacgccatatccgcctatggcggcagttcatggacccaggtctggaaagtacggctgattgccgcgctgccgtcggtgttctccgcgctgcaggtggccatccccggcgccgtactcggcgccatcgtcggcgagtatctcggcggcatcgacacgggcatcggcgtggcgctcaacgccgcgcaacgtcaggtccagccggagcgcgtatgggcgctgagcatcatcaccggactgatctcgttgttcggctacggtctggtcggtttgatcggccgctgcctgacgccttgggcgaaggatggtcatcgatgagcaccagcatcccccgctttattttgcgccgcatggtgatgaccatgctggccatcatcgtaacttgcgtactctggacgctcattcttgagatcttcaaggtgaacaccatgatcggcaagcggccatgggacgtatatcggttcctgtttgttggggacggggccgcgcagaatcggcagacactcggcgcagacctgctggtcaccgtacgcgatgccggcatcggatacgtagccggattgctgaccgcattcatccttgcgctgctgttctgcttctccccgattctggagaacatcatcatgccgaccgccatggtcttgcgctcgatcccgctggtcgtaatgaccccgctgatcacgctgatcatgggcatcgggcagaaaagcgtgacgacgctggttatcatcgtcgtgttcctgcccgcgctggccaacatcctatatggtctgcgcaacgtgtcgggcgagcatcgagacgtgatccgcgcgttcggaggcaatgcgctgacccttctgctcaaggtatcactaccgggatcgatcccctcactgttcgcatcggcccgggtctcgatcccctcagcggtggtcggcgccatgatcgccgaatggctctcgaccggcgaaggcctgggaggttcgatctccaaagcagtggccgcattctcctacagccgcatgtgggcatccgcggtcacgatcgcgctggtgaccatggtcgcatattcggtcatgagcatcatcgacgatctggtcgcacgcctctacgaacaggactgagtacgctcccggtccggcggattcaagtcagcaccacggtcgccggtccataacgatgcagcgaggtggcggcccacagatcgaaccgccacctcgcttataatcaaccaatccggatgattgccgccgcatgggacaggcgacatcatgcgctcccccgagcgccacatcgatggaggatgcaatggccgataacggcaccttagtgaacataccgctgtgggatgggcaacgctaccaagacgactgcgacgtggtttgggatagcggaatcattcgtgggatccgcccgcatgccgatggtctctcatccgccggtaccgacaccgatcgaacgatcagagcagacgccccgggcatggacggactgtgcgtgattcccggcctgatcgacacccatctgcacctgtggtatccgacaggcaaccgcaggatcgcggacacctcggcatggcctctgtacacgcctccggaggaacgctcgctgcatgtgctgggcaatgcgctggcgtgcatgcgcaacggcgtgacgacgatgcgcgacatgtcgtcccatagcacggaaatggccgtggcccgcgctttggacgaacaggtggttcccggcccccgactgctggtcaacggcgaggtcggcatgagcgcaggccacggcgacctgttcacgccacctcgggcacgtcagcgcaaccccgtggccgattcgcccgacgaatgccgcaagcttgtgcgttcgtgggcccgtgagggtacgaccggcatcaaactgtatctcagcggcggcgtgctctccatgggagacaaggtgggctggcgcaaccagaccatcgctgagatacgcgccaccatcgacgaagcgcacgcactgggattccaagtggcggcgcacacgcacaccgtcgaaggtatccagatcgcgctggacgaacatgtcgattccatcgaacacgccaccgccatgaccgacgagcagatggacgccatcgccgaacggcatatccccgtcgctccgaccttgctgatcaacgatcgcatcgcacatggcgacgtaccggtctcgcctgaagcccgtgacaaggcacgccgtgtcgtcgagcatcgtgacgacatgttccgcaaagcggcggacaggggtgtgcgctttgtactgggtaccgacgcgtgcagctcgctggtcgcctacggcgatcagatggaggaagtacgcgacatggttcgagttttcggatggaacgccgagcgcgcgttgcacgcagccaccgccgacgccgccgacgcgatgcgaatcggcgacaccatcggccggctgcaggccggctacggcgccgatctgctggtcatgcgcggacgcccatgggaacgtatcgaggacctccggctcgacaacatcgtcgctgtgatcagccgcggtgcgctggtcaggggcacgcttccccgcacggcggtctgacggagcccggctccggcatccgagtatcgtcccaatatggtttggggccgcagcccgataggaactgcggccccaaaccatgcgcatcacacgctcacacggcgatgcgcatcacgagaatagttcccgtatctgcgccgccgtaccgtacgacgcctgcgcgccatatccggttgccgcatacgcggagacgaaggaggcgagtcgcgcggcgtcgtgcagcgggaaaccggatgcaaggcaggccagcaccgtgcccatgaacgaatccccgcaccccgtggtgtcgacggcattgacccggaccggatcgatgcgtgtcaccggggactcgctgcaggtcgcgtcaagcaccatcgaaccgtctccgccaagcgtgacgatcgactgctcgaaaccgaactcgcgcatgcgctccagcgcggcgttccagtcgaatccgagccagtcatcatcatccggctcgtcgattcccagcatctgcgccatctcatgctcgttgacgagcagaacatcggacacctccaccagcgaatccgtcagggtcggcgtgaacggtgagttgttgagcagcaccctcaccccggcatcgtggcacatccgtgcggcggcggtcaccgtttcgattgggctttccaggcacaggccaagcacgctcgacgctgtcagcgatccgcgcatcgattcgatgtagtcgacgctcacctgcgcattcgaaccgggcgaatacacgatcgtgttctcgccggcggcatccacggtaatcaccgtggtgccgctggccccgagcacgcgacgcacattcgacgtgtccacgccggcttcgccgagtcgcccgaggaggaaatcggcgttgacgtccgaaccgaccgccccgaacatccgcactgtggcaccgatgcgcgccgcggcggccgcctgattgccggatttgccgccgggcagcacctgcagggggccgccggtgacggtctcgcccggcccgggaagccactcggtggtcaccgtgtagtcggcgttcatcgagccgaccaccgacaccgtgccatggatgtggctcagcgccgcaagagtcgtgaagtcagtcattattatcctttttctgaaaacgctggcaccccggccgtaccagcgcgagtacaatccgcgcgggcacgagtgatggtcaacattgcaatctatcaatcaaggtttgcgtaaacctgcgcggatacctcgaatcggccaggaccatcaactccctcgttgcccagtcccccccacgaaaccgtccaatacattgtagccaatccagcccatgtagtactgggtcgacagcttggcgtccgaaccgtccgtgtacgagctcgacgacgtgtaggtcgaatcgaaatagatggtgtcggaatcggcgccggcggccttggcgaactcctccgacatagcgtcgatactctgcgaatcctcgaccatgtccatcaccatgatctcgaggcgcatctgcggcgtaggattagcatatgcacgacgatcgctacgatcagcgcgacgatgccgaccgccagcaggctccacccgaggaagtgctcacggaagaacgcccagcgctcgcgcccgcgcaaccggcggaaggtctcgatcttcgactcctcggcattgctcggcgccgccgccagatcgctgaccatccgcagttgctcctcggtcaacggccgtcccttggtacgatcgtcatctcgtgccattaccagcacctttcatccgtattgcgggcattcaccccattcacgttatcccccgcaccttaccgtacggtgatattggcggatcgtccgcactcggcggacgtgcccgatggacggagcccgatcccaaagggtggtcatagcccgaagaccgagccatgaccaccccagccggctgctgcaggcagtccgttccggctactccagctccacggcacccgtgtagagctgcggagccgtcacatgggaagtccggcggactttccataggcgacgccgaggcacgacagtgccgaggagacacagacagcctgccgcgggcagtccgtaccgactactccagctccaccgcgccggtgtagagctgatagtactcgcccttttgcgcgatcagctcgtcatgcgagccacgctcgatgatgttgccgtggtcgagcaccatgatcacgtcggagttgcgtacggtggacagacgatgggcgatgacgaagaccgtacggcccttcatcaggttatccatgccggcctgcacgacttcctcggtacgggtatcgatggaagacgtggcctcatcgagaatcagcgcgggcggatcggccaccgcggcgcgggcgatggaaatcagctggcgctgaccttgggacaggccggatccatcaccctcaagcaccgtgttgtatccctcgggcagcatacggatgaagctgtccgcattgaccagacgcgcggcctcaatgcattcctcatcagtggcgttcagacggccataacgaatgttgtccatcacggtaccggtgaacaggttcacgtcctgcaacacaatgcccaaagacctgcgcaaatcaggcttcttgatgccggccacggagatgccatcatacagaatctgaccttgctggatatcgtagaaccggttgatgaggttggtcacggtggtcttgccggcaccggtggcgccgacgagcgcgatcttctggccgggcttggcgaaccaggtgatgtcgtgcagcaccggcttgtccgggttgtagccgaaggtcacgttggtgaagcgcacgtcgccgcgcagcagcgtataacgcccatcaggcgaggtgatcgcctgctccttggccttcatcgccacctcgcaggcggaaccgcacagcttttcggcggccttcagagacctcgtaccatcgtcgccgatctcacgcttccacgcccagtggccggtctcatggtcgacttcggtcatggtgcggccgtccggcccaagttccacgttcacgagcgtcacggtgcccttgtcttcctcgatgggttcgtccatcaacttgaagatgcgggaggcgccggcgagcgccatcatcaccatggtcagctgctgggagacctggccgatcgggttgatgaacgagcgggacaaggtcagcagggagacgagcgtgccgagggtgagcggcttgacaccggtcagaccgatgtcattgacgccggccagcgaaacggcggcaccgacgatggcgagcaggatgtagagcagatagcccatattgccgacgaccggcatggtcacattgccccaagtgttcgcctcggcggacgcctcaaagagttcctcgttcttctcatcgaaggtcttctgagtggcatcctcatggttgaagaccttgatgaccttctgaccattgacggactcctccacgaaggcgttcacgtcgccgatccactgctgctgcttgacgaagtagcggccggaacggctcacgatcttgcgcacgatgaaatacagcagaacggtgaacacaatcacgaacgcagtgaacgggattgacagccacagcatggacagcaatgccgcaatcgcggagataatcgaggagaacatctgcgggaacgactgcgagatggcctggcgcagcgtatcggtgtcgttggtgtagtgactcatgatgtcgccgtgctcgtggctgtcgaagtagcggatcggcagcttctgttggtgggcgaacatatcgtcacgaatcttcttgagcgtgccctgttcaacggtgatgatcagccactgccaagcccaggatgccacgataccggccacatacaggcagcccatcagactgatggcgcgcagcaacggagcccagtcggggttcgattcccccaccatcggcaggatgtaggtgtcaatcagcgattggaggaacagcgcggatccggcctgcgcggcggcaccgatcaggatgcacaccacgatggcgataacgcgcaatttgtattggaagatgtagctgaagatgcgcttgatggttccggggtcggctttgcccatgtcaggctcgcgattcttgaaactctggtcgttgctcatcgtgcttctccttccttggtatcggctgcattggtatcagctgcgctggtatcggccgtgggcatggtcactgtcaccgtcacggtttcggacggctcagcggtagatgactcagcagcctgtccggcagcggccagttctccggtcttagcctggttcttggtctgggattcgtaaatggaacggtattcgtcgcaagtggtgagcagttcctcgtgcgtgccggaggccatgatacggccggaatccatgacaagaatcatgtcggattcctgcacggaggccacgcgctgggcaatgatgattttcgtggtgtccgggatctcgttgtggaatgcggcgcggatcagcttgtccgtcttggtatcgacggcgctggtcgaatcgtcgagaatcagaatcttcggcttcttcagcagcgcacgggcgatgcacaggcgctggcgctgtccaccggacacattggtgccgccctgctcgatgtacgtgtcgtacttatcggggaattcctgaacgaatccatcggcctgcgcgagctgcgcggcatggcgaatctcctcatcggtggcgttcgggttgccccacctgaggttttcggcaatagtgccggagaacagcacgttcttctgcaacaccatggccacctgatcgcgcagcgcctcaatgtcatagtcgcgcacgtccacgccgccgaccttgagcgagccagagctcacgtcgtacagtcgcggcaccagctgtaccagagacgactttgccgaaccagtaccgccgacgatgccgatggtcatgccagaacgaatcttcaggttgatgtcgtcaagcacgggcttttcggaactgtcggagtagcggaaggtgacgtggtcgaattcgatggagccgtcggccatgtcagtcaccgggtgagccgggttctgcaccgtgctttcctcctgcagcacctggcagatacgctcggcagaagcctgagaaataatcaccatgacgaaaatcatggacagcatcatcatggccataagaatctgcatggcataggtgaccagcgaagtcagctcgccggtggacaggcccaacgccgcattattgccggaagcgacgatctgctgcgcgcccatccatgcgatgagaatcatcgaggcgtagacgcacaccatcatgatcggcatgttgaagctcatgatgcgttcggccttggtgaagtccttgaagatgcgctgggagatgcggccgaacttggagacctcgaaggattcgcggttataggacttgaccacgcggatgccctgcaggttctcgtcgaccacgttgttcaacgcatcgtaggtgtgaaacacgcgctcgaacacggggttcacgagcacgaccagaccgcacaggccgatggccagaatcgggatgcaggccaggaacaccatggaaatcgacggggagatacggaacgagaacagccaggctacgaccaccatgatcggggcacgcacgcccagacgaatgatcatcatgtaggcgttctgcaggttcgtcacgtcggtggtcagtcgggtcacgatcgaaccggtggagaaccggtcgatgttggtgaagctgaagccctgcaccttctcgaactggtccttgcgcaggttcttggcgaagcccgcgccggccacggccgcgtactttccggacaggaagccggcacccagcgaaaccatcgcgcacaccagcagaatcacgccgaacttgacggtggccggcatgctgccaccggtgataccctcatcgatcagcgaagccatgatggtcggaatcaggatttccagaataccttcgaccgccacgaacaccggagccaggatgctggctttcttgtattcacgaatcgaatgacccagcgtgcgcagtacatgcttaggtctaccgggttcgacggctttgcgcgcctgcgcgattgcctctgcggtatcgctcattcgttctcctccttcgtgttagcaacctccgctccgtcttgatcgggagccatcaccacaggtgactgagggagtgtttgatgttcaaattcataatcaagagacccatatacaacagttgtacatacaacaatcagcgtgttgtagtatttccggctcttccgattttggcgtgtaagggcatgtgtcagaggtgggtttggatggcgtgtctgaagccgccggcgtgtagcaggcttctggtgatggtggcgtcgaggttgcggaagcccagggccatgcccctgagggtctcgagccttccgctacggcaggtccttacgttcgaacacccacatggtctcgtccgtggatctgttgtcggtaagaatcgtcaacatgaaccgctcaccgtcgttcttcacgtaaccgcattgcactgcaccttccgacttgagccggctacggacgacatcgtagtcaagc

SEQ ID NO: 2989 - DNA, 4564 bp, Unknown
  R19_24m  MAG No. k141_11557
cgatatgggcgtgcaggacggctccattcccacggcataccccgaggaggcggcgcaactgctctcgctcctcggcaactactggctcatgccctgcttctaccccgccgatcatgccggcatggaacaccgcatccgctgcctcgccacgatgctcgacgccatcggcgtgccagtgttcgacgagacgctcatcctgcggacgaccgaagagctcacggccctgacgccggaagaggatacggcgtccgcataggagacgcgcccgggtgcaccgcttcttgcacatcctgacgccacagatgtcgaagcgcttccgcgcccttttccttgggcgtattgtcatcaccataacagaccgacggtcggtttgtataaatggccgtggccaatcacaagaaaggaatccacgatgacgaacgcatacgaatgcacgacccaaccacaaagaagccaagccgctgatcctcttcgcacacgcgacttccgcctgctcgtcgcgggtctcggaatatcgctcttcgccaaccttatgctgcggtttgccatgtccatgtgggtgcttgacaagaccggctcggcggcggcgttcgcctccattcttactgcgagcatcctgcccacgattctgctctcgccccttggcggcgtgatggcggatcgtacgaaccgtcggaccgtcatggtggcgcttgacgcgctttccgccgtgacggtgctcgtctgcgtggcgatcttttcggccgccggtttcaatctggcggcgatagccgtgatgcaggtggtgctcgccgtgcttgacgcgatggagacgcctacggtgcaggcggcgctgccgcagatgttccgctcccatggcgaggatgtgatgcgtcgcgcgatggccgtggtgaacgtagtgaaccagacgagcacgctcgttcccgccgtgctcggcggcgtgctatacgcggcggttggtgcgatgcccatgatggaaatcacgatcgtggggttcggtgcggccgccgtcgtggagtgtttcatccggctcggcgctcccgaccgcggcgacgtcggccgcgtcaccgcggtcgacgacctgcgcgcggccggacgtttcctcacccgcgaacgtcctcatgtgctgcatctggtgttgatctgcgccgcgctcaacttcctggtgacggggtatgcggaggtcggcttcccttacatggtgcggaccgtactggggttcggttccacggcgtacggccttgcatatggtctcgtgggagcatccggactgctcggcgcgctcgtcggtgggcgggtcgcgaggtcgctgtccatgcggcgattcccgatggcgatcgccgccttctcgctcaccatcctgccccaagcgcttgtcatgacgattcccgcaggtggagtgatgcgacgcgcggtgctcacggcgagcacctgcggacccatgatcgccatcaccctcgcgaacctcatcgccgtgccggcgatccagataggctgccccgaggacatgaccggcaaggtgatgtcgctcgcgctctccgcgagcatgtgcgctcagcccctcggacagatcgcatacggctgggcgtacagcgtccacccggcgggcgcggtcctggcggtgacgttcgccctggccaccgcgatgctgccgccagtcgcgcacgtaacgcggcggttctaggacgggattccatcaccttcgctctggacagctgagacatcaaagccatgtgtggatatgcaaacggccttcataccgcacttgtccatcacacaaccggactggaacatgaacaggcacgcagtcacggttgcataataggattcaagtcaatagcagccttccacgcctcctcacagtgcgcaacccggaaggtcctttttattggcgaactcgaccggtttggcctatcgcaacagtcgttcgttgaggatgacaggagcgtgttcgattgacggctgcaacgcatcgagctggtcggacagcttcgactcgtcgaccaccggcagttcgagcagggatcgtgcggccgcgtgcaggtagtcgttcaacgcctcgatgcggcccggctccagcgggtaagccgggtcgttctccaaggtgacgtccaacgttttgcgcaacatctcatgctgcgcgctgcccatgatggccgcgcactggtcgcggaacgtcatacgagaatttgccggctgacgttcggacagtacctgcggaatccacgcgccgccctcccagtcggcgcgcatgtcgttcttgaacagcgacatgttatggtcgaacaacggcgccggacccagaatccggccggtacggttgtcgcgcaggaacccgtggttgttggcgtgacggtcctgattgacgatgagcgcgtcgaacactagcatcgtgcgcatcgcctcgaacgattcctcggacacggcgcgtgcggcggcgaggatctccgggaacgacgccagctgcgtcgccgcatagaacgacacgaacgacacgtcctttgagttcatcgaaccgcacaccgacgcgagcttgcccttccaacgggcgatgcggtagtcgaccgcattcacaccgagcctgcgcgccagctgcgaggcgagatactcggaatacggttccaaaccggcgttcgcataccattcggaacccgccttccacagttccagcccacgttccgtatgccgccacgccttcgggaactggccgtccgtcgtccactcgctcgacaggccgatcgcatgcttctcgctcgacgtataccccgtgtaggccacgatggcgagcgtctcgtccaacggattgtcatacaggttgatgtccgcgaacttgaggttctcaccgtcgcgttccgcccagaacgaatcgttgaccgacagccccttgcacaggtcgatgatccccagcgtatccgcaatgctcaaccccgcctgcgcaagaacctgcgtggcgaactcacgattcttcggaatcgtgcgccgctccagccacgtcgtcagcttcgcattatccggctccggagccaacggaaacggcagcaacgcgcgcttcgactcatcgaaccagcggacatgcgcctcgatcttgcccgccagcaggccctcgccatacgacgcatcgaaccggagcagcggatcatcatagagccgcagcacgtaactcgtcatatccggcccctccaatcacaagcccgctccaaagtcatatcgggcgattcacatatgaagaacaactgtctacagtatagacaagggccttggaacgcgggggcttcactctgaagtcaagtatttgatacaatttggtgcaaaaagatagtaaatagcaataaggagtggctatgagcatgcagattgccacgcgagttgatgacgagcaggctgcgttgtttaaggagacgacccgacagctgggtaccaccccggccgatgccctgcgtatgttcatcagcgcgttcaatgattaccgtgggttcccctatgaggtgcgtttgccacgaaatgacgtggagccgtttgcgtccgagcgggacgctactgagtatgccagtcgtctcgccttgaggatgtccgatgaaacgaggtgagatttggacgttgcaggccgatggctacgccagcaagccacggccggttgtcatcgtgcagagcgatgccgtcgatcggttcgattccgtcatcacttgtctgctgacctcatacgattcctccgacatcgacacgcgggtccgattggaaccaagtccggagaacggcctgaacaaagtgagttacgtgatgacggacaagatcgtcaccgtcgaccgcaaactgctgggataccaagtcggcgtggttgatgatgcagccatggcgaatatcggccgtcagctcatgcgggttctaggtttgctgtgacgtttgggatggctggcgggcgtgcgtctacttgtgacatcgtttatgcacccttgaggccgtatgatgatggcgtcgaattcaagctctccccaacgtctaagaaatggcttccttcatattacggtcatacgaccaacaccatatgaaggaagccattatgaatggtctaacggcaatcagcttctcatacgtgattgccagtcattcaccgaatcagccgcggttgtcgaacatctgcagcagcatcttgctgggttcgacggcatagacggtgtgcggcagacgggcgctcaggtagacgatgccgccggccgtaagctcgacttcacggccttcgccgccgacgcgcagcttgccttccagcacctggatgatcacgggcatggccgcggtgtgctcgctcagtgcctggtccttgtcgaagccgaacagcacggcgcgcaggccgtcctcgcgcagcaccgtacgggagacagtggcctcctcctgaatatcgatcaacgaggccaagtcttcgatgaatccaagatgcggctcggtcgaaatggcgtggccttcggcgtcgtgggcgtcgtgcttgcaggcgcagtgcttggcctcacccgcttcagcggccgcgacttcgccatgcttgcagtggcactccttcttcgcgcccggctcc

SEQ ID NO: 2990 - DNA, 18910 bp, Unknown
  R19_24m  MAG No. k141_11706
ccaagggccggccctaccgttcatgacggctcagggaacccctccggacgatgcccaaacgaccggccgaccaggccgggaccgaactggaccgccgggtgttccgggcgtcccacagccgcatccccgagatcgtcgaactcgcccgaaagatccgccgtcatgggcccgacatcctcgggacaatcgaattgggctgttcaaacgccaggctcgaggcgtccgacaacaggatcaaggtcaccatccgcatggcctacggcttccaccacgcgaacaatcccatcgccctcgtcatgctccgccgcggcggactcgacatacgcccaccacaaccaagaacccaacccacgaaaacagcagaagcctcatatgtattggacatttctgcgcagagagggaggtgtaaccgcagcattacggtgtgagaacgcaaggttacatagctgggcattggctgtggcgttgctggacattgaccgtcgagccggcaatcatggcgcaagcgacaatcacgacacgccgttattgacataccgccgttcaatggtattgtaattacttgtgcgcttttgaagcgtatggatcgggcccgtagctcagctggttagagcgcatccctgataaggatgaggtcggaggttcaagtcctcccgggcccacagaaaaaatgaagcggctgcgagccgctctttttttctcacggggctatagcgcagctggtagcgcatctgctttgcaagcagagggtcgccggttcgaacccggctagctccacagacaacccttggaataataccgattctgagggtttttgcgttcttgttcgagggattctcccagtgcgccatggccctctccatcgaaaaaggggtggtcctgttaaggaccacccctcgaggattcagaccaaccgcgtggtcattgtcgctccgtcttcacggaacggtacacgaaaatccttcgccttgcggcgatatcgcccggacccggaggactacaccttcctctcgggtggaaggtaccggcagataattggctcttccggttttggtgtgtaggggggatgcttataggtgggcttgtatggtgtgtctgaagccgccggtgtggaggaggctgcgggtcacgccaaaaccggaagagccgttttcttttccttctccggtggtttcgtcgttgaccgtgttgccggtggcttccttgcaggcttgtttgtaggcttcggctgggctggtgtggtggagggcgcggatgcgtgcagcggcgtgttcgatgtgttcgagcgtggcggatggcgcgtcggtcaggccgtggcgggcgaggacttcgttgcgccacgagtcgtagcgttgctcgcgcaccacgcgtggcttcctccgccccctgacccatgcgtcggcgtacgcccaatcgccttcctcgtagatgtcgcgtgcccaggacgccgtcggacggtcgaacgggtaggggcccgccggcagcggcaacttgtcgaccgtcgggtcgaacacagtgaatcgtcgccgttccctcgcttcgcgttcccgttccggcgctgccagcgcctccgcgacgtccgagtggaacgcggccatgcgctccttggcgccggaggacgtgaacccgtcgtcgggttcgcgcagtccgtgctcctcgagcagcgggtggatgtcgtggtccatgagccagcggagccgggacatgttgaacgcgaggatgaatgcgagcgagattgcgaccatgaggcccatcccggcccccatcagcagtgtgctcatttcagccggctccagcgttcggcgcccgcgcgcgggctgaaacgtccccgccagtcccacggtccgacgaaacgcaaggccaacagaatcggggagcatgtggcgaggaacgcccagaagaaagccaaccatccaatccagtcaggtgtggatctgccggtgtcgacccattgcgcgctcgaccagaacatccatgtcatcgctatggggaagcccgatatcgcgatgaggaacagcgtgccgacgatggggccgccgaacatgtagcgcagcttcgtggcgggcacggaggaggcgaatgccaagtcctccagcgaggcggggacgtaggtgttcggccggccgaacacgagccggcagaaaccccagtacaggaggagtccggccagccacatcacggcgaccgccacgtacgtgttccatgcgtcgcgggatatagtgaccggtctgagaaaagccagcagcgtcacgtcatcggtatgcgtgtggtgcgtcttcgtgtccggggtgagcagccgggcgatgccgtggatcatgaccatcaggccgggcgcagccgcggcggcagcgccgccggccgccgcgccagcccgcgcccagccggaatcgccgccgaaatccagcttgcgcttgaccggcgtcttctccagcgtgtcccagaacacctgcgccccgtcctcaagacgccccaccaacacataccgagtgaacaacgccaacagatacccccacttccaaaacccgagattatccttgaaatgactgcccgggtcatctccaccgcctctgtgcacctgattgtcgtaaagtgcgtctaagccgctacttatcagccatccggctccagtgccaatcgccgttccgacaaatgcgccgaccacggtgccggcaccggggacgatcgatccgacgaccgcgcccacggcaccgccaacggtcccaccgaggccatcaacggcaggcccgagaccctacgcggcatcgccctcggcttccgcaacctcgacaactacgtcacccgcagcctcctccacaccggcggcttcagacacaccatacaagcccacctataagcatcccctctacacaccaaaaccggaagagccggatgattccctgcaagccgatcacgccaatccgacccgacgactaatcagattgaggacggctgaattaagcttgtgccctcatgatacaacatgtcctgcgaccgacgccagacacaacggcagcattctgcccaccatagggcgtgtctttaaccagaaagtaccctcaaatacgttcagcaagatatatgcacgcagaacagcccttccgcattatcttatttgacatagagcatgccccttccattccacagaatcaagcaaataaacgagcggagagactggacacaccgcaaaacaatggcccaacccctccgctcgtttgttatggaaggaagagggatgaataagtatgtttacttcactgacttgatgaagacgatcagcaccgcgccaatcagcgagcagaccgctgcaagcgggaagagtgcgtgatagcccaccgaggaaattagcgccgccgcaacatcccacgcaccatattcaggacaaatccagtccgttgttgtccttggctttgctcaccatatcagtcaaatcggggtcgttcacagacaccgcgttctgctgactgagcgtcaacgatagcgagccattataggagtcgccgtcttcgtccttgccggacacgcttatggcaatcgaattcatcagacgctttctgccgtagttcagatccacggtgatagtcggcatctccggctcttcatccgtgccgaaatcccagttgcgcacattatcgagcgcctgacggtactcatcttcagcatcgtccacgccggcatcctcgatttgctgaatcacccaggatttcagatgcggatactgcgcttcatgactgatccagtaattcacgaaatgctgagacaacgctttgatatcgatttggtacgacagctgcgtattgccggcagacttggcagacgatgtattcgggaacagctggctgcgcacattcttatcttccagctccacgccgaaatattgttggatgaatttgctggcctcggccttcacctcggcagaccttttcgtgcccttggcccggtcgatgtcgttcgagtacccatcgtcgttcatcttgtccagctgatcgtagaacgtttgctccgcgccggtgatgtcccaagcaccgttcttgaccaacgcatccttgacgttcaatatcaagtccgccacatcactaccaacgccgttccttaagtcatcttcatattggtcggccgggcagtagatgtagtaggggtcgtcgtcatgccaaacgaatttctcggcgaatgcgcctttgtaccaagcgaaggtcgttgcatattcgtctgttttgctagtgaaggacgcggaggattcgttggtggttttgcccagcgaatacatgccagacatccgcacgtcaagagaatcgccagtgctgctgtgggttctgagttcgtatttggtgctgcgcagagtggacagcgagttgatcgcgtcgaaggtgacgaccagcggattggtgggccggaagcccagcatcgctttgacggcggtgaagttggggatgatgaacgccaaggccgccaccagaatcgtcgcaagcaatgcgcagaaagcggcgatcagcttcttgctggatttgcgctgcggtgccaggacggcggttgcatcagtcgcctgatatgcggcaggagcgggaatcggcaaagccggcaggggaacggttggtgccggctgtggggcagcggacgcggcgtaaaccgatggggcaaccggcgcggctggtatcgatggtggtaccgcagacgccggcacagcaggtgccggtatcgacgcaggcggtacggctggcgatgcggccggtactggtgccgtcgcaactggtgcgctgtctacagacgctccacatgccgggcaaaatcgtgccggcccatcaactctatttccgcagtggccgcagtacgccatcgtgtgcctctctccctcaaatcggcttgattgccatcgcttcaatgttactcttcagcattacgcctcagccagcccctacgcgtaacgatacgagacgcggcagccttaatgcggttgttttgacgcgatgccaacatcgagctctggccaacgttctggtactcggctacatcttgctgcgagccaagaagcaggccatcgctcgcgccgacgaggccgaatggcggtctagcctcgctttaagcctcaggccagcacctccatggggtgataggtggcggtgtggtggccggtgatggggttccatacccgttcggcgaatgcgcgcagacgggcgacgccctcgcacagctcgtcggcatctccggcgtaggagaggcgcacgaagccgcgcccctcctcgccgaaggcctcgccggggaccacagccacgcgctcttcgtccagcagacggtctgcgaattcaccggagtcaaggccagtcaggcgtacgtccacaaaggcgtagaacgcgccttgcggttcgatcagacgcaataccgggcatccggccagaccgtccagcacgatctggcgcttggcgcggtattcctcgcgcatggcggccacgttatcttgcgggccagccagtgctgccacgcctgcgtattgcgccaaggagttcaccgaggagtgcatgagttcggcgattttgccggtctgttcgatgaccgcttcgggtgccagcaggtagccgatgcgccagccggtcatcgcataggttttcgacaggctttccaccacaatggtgcgctctttcatgcccggcaccgcggcgatcgatggtgccacggctgcctctcccccaagcgtttccccgaacgtttccccaaacacgaacggatggtaaacctcgtcggagatggcccaaatattgtgctgcttgcatacttcggcaatacgcgccagttcggcggcagaggttaccgcgccggtcggattgcccggtgagttgatgattacggcgcgggtgcgcggggtgatcgccgcttcgatgtccgccgcgttcacgcgcatgccgtgctccggacgcagcgccacggtgaccgggcggccgccgcacagcatcacttcggcgtcataggaagtgaagaacggcgagggaataatcacttcatcgccggtgcccaccacggctttcagcgccagaaacaggccaatcgtggcaccgtcaacggcttgaatctcggtttcgggatcataagtaagtcccttcacacaggcggagtaatcggccacggccttgcggtattcggggatgccaagcacgttggtgtaccgagtgcggccagcctgtgcggcctcgcaagcggctgccacgatatgcggcgcggccgtggcgctgggctcccccacggtcagtgaaatcgcgtcaggcacgcgctctacacggtcgaatacgtctcggatgccggagcgcgggatattcagggcttcggcggacaggctcgcgggctcggcggtcggcacagcaacccgaccggcagcaggcatagtagcaggcgcagcagcagatgcaacttcggacagagacatgttggaaaacttctgcatatcatccctcctcaatggaattatttcatcgttctcttatttcaaaaggaattattacatccaattaggactttaaacgtaaacattccaccacacaacagaaaacacaggaagaactactgaaattaccaggcaaaatcggaaagccatcgcattccggcaacaggtacagtgaacacagagcacaacgaacggagaagacatcatgaccgcgattgacgagaccgaccagcgcatcctcaccatgctggaggccgacggccgcgccacgctcgcgcaactggcccaggcgaccggactgtcagtctccgccgcccagtcgcgcgtgcagaagctggagaagcgcggcatcatcaagggatacaaggccatcatcgaccaagagcagcgcggcttgcccatcagcgcgttcgtcaacgtgaccccgctcgactactcagccgaatcctcgattccggacaagctgaacaatatcgacggcatcgtctcctgctattcggtggccggcgcccccagtttcgtgctggtggtgcgcgtggcttcccctaccgcacttgaagaactgctcaatctcatccaccgcacggtgccggtaagcaccgagaccacgatgattctgcagacctacttcgcacactgaccgcgaacccggtaacctgcgcgccgaagacctgcggccacacaccccacaaaccccacaggtcacaaaaaccatacgaccccacggtccagccacaccccacaaaccccacagaccgcacgatccccaacagacacatctgacatcacccaagtccgcctttatgtccactatatgaacgtgcctccggtgtgatgcggcttccatttcgacccgattcacgcatagacagacatccaacaatcgcccgaaaaatctaacaaacggaaacttgagccactccataaccacgccgaaagctttcccgttatccgagcgagactctatgcagcaagggcctgcgcgcatagaataaaaccgtcttaattccctaccaaatcgaggagaatcatgctcactgacgagtacatcaagcgtgtctacgaccaggtcgttgcccgtgacggcgatcagccggagttcctgcaggccgttcgcgaggtcttcgagaccctgcagccggttgtcgagaagcacccggagtacgagaaggccggtgtgctggagcgcatcgtcgagccggagcgcgccatcaagttccgcgtggcctgggttgacgacgagggcaaggttcaggtgaaccgcggctaccgcatccaattcaactccgccattggcccgtacaagggcggcctgcgcttccacccgaccgtgaccgagtccgtcgtcaagttccttggcttcgagcagattctcaagaactccctgaccacgctgccgatgggcggcggcaagggtggctccgacttcaacccgaagggcaagtccgacgccgaggtcatgcgcttctgccaggcctttatgaccgagctgagccgccacatcggccagttcaccgacgttcccgccggcgacatcaacgtcggtggccgtgagatcggctacctgttcggtcagtacaagcgcatccgcgacgagtactccggcgtcctgaccggtaagggtctggaattcggcggctccctggcccgcaccgaggccaccggttacggcgtgtgctactacacccaggaagccctgcgcgtgctgcgcaacgactccttcgagggcaagaccgtcgtgatctccggctccggcaacgtggccacctacgccgctcagaaggctgagcagctgggcgccaaggtcgtcaccgtctccgactccaacggctacatctacgacccgaacggcatcaacgtcgaggtcgtcaagcagatcaaggaagtcgagcgcggccgcatcaaggaatatgccgagcgcgttccgggctccgagtaccacgagggcagcaagggcgtgtggaccgtcaagggcgacatcgctctgccgtgcgccacccagaacgaggttgatggcgaatccgcacagaagctcgtggacaacggcgtgaccgtggtcgtcgagggtgcgaacatgccgtccaccccggaggccatcgaggtctaccagaagaacggcgtgctgtacggcccggccaaggctgccaacgccggtggcgtggccgtctccggcctggagatgagccagaacagctaccgtctgtcttggaccttcgaagaggtcgacgccaagctcaagtccatcatggaagagatcgtcgccaactccctggccgccgccaaggaatacggtcacgagggtgacctgatgctcggcgccaacgccgccggcttcgtcaaggtcgccaacgccatggttgcccagggcgtgctgtgacgcttgcctctgagcagtactaagcagtagcgtaatgcccttgcttcccgtgaggaggcaagggcattgctatatgtacaacgagcaacaagtgctatccccaaatacgtaagcccgataacaactcagcttccacctccataaccccggaactcaccaccgtcgatcagcacatggatcagcgcgctggaccatggccgacgtggtcatcaaagccatcaacggagtctcttcaccgcgcgtgatgcacctgaacaccgatttggtggtgcgtgagtcggcgtaattgccacgtggctgtcggcaggactctagataccgcgtcacaatcacccagtaatgcatcacgcagtgtataactcttccgcggaaacgaacaccattcgttcatcatccatgtagcgggttcgcgtggactcactcaccggattcttggtgaacagcataagccacgcattacctgcctgatagccgcggactaagccagcacgctgatggagcttttcaatagcctccgtttcgttgaatgaattacgccatttgcattcaccgaacagaatcgttttatcgagcgaatccgcagcaatcacatcgatatcggtttgctcgtgagcaatcggatcattgccccaccatttgccgaactgagtggcaacaaaggggaggttgcccatagcgttgtttcgaataagccattgcaggcaaatcgtctcaaattgttgaccaacataggtatcaaacgctggtccaaaagcgagtctgctcgtaacctcctcgctgatattaccatccaaaatgctcatgttgcgccccacaaagcggaaccaatatgcaaagaagggatcgctcaccacatacattcccttgcgcgatttactcggatcttcaccaaacggcacttttcgctcaattaagcgcaaatcgaccagcgttttcagatatgctccaatcgaatcagatccgacacccgcatgttcagcgataagctttggcgaggaattaccacccgcaatagattgcaatatcgaataatacgatgccggttcacgaagctcctgacgcaacagcatcataggttcctcacgcagtacgcccaagttgtcgaacatcaagcgcagcacattggattcaaagccatcggcttcctgtatacgggccagataatatggcgtaccgccgaaagtcgcatagtattggaccagttcttgcggagatgtgttcgttagaaattttgccgcatccgcatagtcgaatggcaggagtcgaatctgtgctgtacgacgcccgtatagcgggcttttacgccccaatacgtcgttttccatgaatccctcgttactaccggatagaatcatcgtcacttttgtggcgaggaatccatggtcaattgctatctgcaacatggagggtaatgctggctcggcggcagccgcataagggaactcatcgaatacgaacaccatacgttcgtcagtctgtgcagcacgttcagcaacaaacgataacgcatcagaccacccgccaaacgacggggtggaatccggcataccaaagaacgacaatgccgctcttgagaaatcttcaagattcatcttggcgctttgctgtatggccgtgaagtacagcacgcgtttatctttgacaaattcgtcgatcaacgccgttttccctacacgccgcctaccgtacagcaccaccatttcgaatgaatcactggtaaacagcttttccagcacttgtaactcgtgctctcgtgcgacaaacattgcagccctccgatccgcctaccgcccaataataagagtatcatggttaatgtaatcacgattaccttaattatgatactgataattgttgccctaccgcgaggaggatcttccttccgctgtcaaaacgaaagcccaacagtccagactgacgagcagcaacatcggcagatcaaccgctgacgccagccagcctgacagcacaaatcagcctgattgcaggcatataggcactagttagcgaaaccggctcttcgcattttggtgcgtaggggccgtgcggtttgattcggtgtgtgattgaaaaagtgaatgaaaccgcacggcccctacacgccaaaaccggaagagcccataaagtcccctcagtagcgccaacctgccagtcctttggcggaaccacaccacatagaccttcctcaacggcgccaagctgccacacgctggcagaccaacaccgctgtgtgcattctctgcgtcggcggcagtccaaaacttggcccagcaacgacgcttgctgtgcccagcgtcggcagagggccaagaattggacgcaaacgacacagaacacaccctcagcgtcggcagaactccaagatctgtaccgctgacgacggtaagccctccacagcgtcgtcagagatacaaaacctgtcccaacaccgacgcctgccacccccagcgtcgccggagtcccaagtctcggcccagcaacgacgcctacgaaccccacacataagaaaccgcacctccgatcatcgaatctgaattacttcagtccaacaaccggggtgcggttcactgaggggagttctgccagtatagctatatcagtcgtcgccgagcgtgacgtgcacgccgccgaccagcgagctgaccacgttgtagatcagtgccgcaatggtggccagcagggtgaagatcaccacttcaacaatcgagaagatggtgacgccggagaccacggtggtaagggacaacacgttcttgagatcgaaaccgcctgcatcaagaccggtggaagacacaatctgcgtaatctggctgaatacaccgaccacatcaagcagcacccatacgatcgcggaggcaacgacctgaataatcgccacggcgatggacagcatgaacgtcaccttggccacggaccaagcatccacgcgggtcagcgacaagctcatgcggcgagccctgggggcgctacggcgaggtgccggacgcacgggagtggcggcacctgaagaaggcaacgtggattcttccggatcgctggacacggagcgtgccacgcggggagcgtgctcagtaccgatcagcggctcgacatgatcgttctgcgtattgccgactgccggcggtatgatccggggctcgttgtcttcgagattctcgctcatcgtttctccttaacaggcttggcggtagcctctgctgtatgcgaggctaccagcttttcaggacgctgctcacgcctcgtccgcgttgttcacattctcgccggattgtgcggtctcggcggtgccgttcgccgcggcatcgccactgtcctcgggctcgtccttctcctcgttacgggcgatggagagaatcgtgtcgcccttgtcaggcttggcgaaggtaacaccctgggtgttgcgcccggtgcgcttgacctcgtccacgttggaacgaatcaccttgccggacttcatgatggccatgacctgatcgtcttcggacaccacgagcgcgccgaccagggcaccacggccctcgaccagttgcacggccttgatgcccaagccgttacggccctgcagacggtattcgctgatggcggtgcgcttggcgaagccctcgttggtcaccacgaacaggtccttgtcggagtcgccagggaccacatccatggccagcaggctgtcgtcgttacggaacttcatgccctgcacgccggcggtctggcggcccatcggacgcagctgctcgtcgtcggcctggaacttgaggctcatgccgagcttggagaccaggatgatgtcatcctcggcgttgcacagcgcggcaccgatgagctcgtcggcgttctcgccattctcgtcggccatgaggcgcacggcgatcaggccgccctggcgcggggaatcgtactcggccagcggggtcttcttgaccttgccggaacgggtggcgagcaccaggtacttggccacctcgtagttcgggatggacagcacggtctggatggtctcgtcgggcgcgaactgcagcaggttggccacgtgctggcccttggagtcgcgcgaaccctcgggcagctcgtaggccttgatgcggtagacgcggcccttgttcgtgaagaacagcagccaattgtgcgtggaggtcaggaagaagtgatccaccacgtcgtcctcgcgcagcttggtgcccttgatacccttgccgccgcggtgctgggcgcggtattcgtcggccttggtgcgcttgatgaagccggagtgggtcacggtgaccaccacgttctcttcggcgatcaggtcctcgacgttcatctcgccggagaacggcaggatcttggtgcggcggtcgtcgccgtacttggccacgatctcgtcgagctcatcgccgatgatcttgcgctggcgttccggcttggcgaggatgtcgatgtagtcggcgatcttgcgctgcaattcctcatgctcggccacgatcttgtcgcggttcatgcgggtcagcgtgcgcagctgcatggccagaatggcgtccgcctgcacctggtcgatgtccagcagccccataaggcccgtacgggcggtgtcggtgtcttcggaggcgcggatgagggcgatgacctcgtccagcatgtcgagggccttgagatagccctgcaggatgtggtcgcgctcttcggcctcgcgcttcaggtacgcggtgcggcgggcgattacgtcgagctggtggttcacccagtggcggatgaaggcgtccaggctcagcgtgcgcggcacgccgtcgaccagcgccagcatgttggcgccgaaggtctgctgcagctgggagtgcttgtacaggttgttcaggaccaccttcggcacggcgtcgcgcttcaagaccagcacgaggcgctggccggtgcggccggaggtctcgtcgcgcatgtcggcaatgccctggatcttgccgtcgcgcacggcctcacgaatggagacgacgaggcggtccgggttgacctggtagggcagttcggtgaccaccaggcacatacggccgttgatctcctcagtgttgaccacggcacgcatggtgatcaggccacggccggtgcggtaggcctgttcgatgcccttgtggccgaggatggtggcgccggtggggaagtccggtcccttgatgatgcggatcaggttttccagcagttcctcgcggctggcgtccgggtggtcgagcgcccagtggacgccgtccgccacctcgcgcatgttatgcggtgggatgttggtggccatgccgacggcgatgccggcggaaccgttgacgagcaggttcgggaagcgggccggcagcacggtcggctcctgggtcttgccgtcgtagttgggcacgaagtcgacggtgtccttgtcgatgtcgcgcaccatttccatggccagcggggccatgcggcattcggtgtaacgcatggcggcggccgggtcatcgccgggggagccgaagttgccctggccgtcgacgagcatgttgcgcatcgaccaggactgggccatacgcaccaaggtgtcgtagatggcggaatcgccgtgcgggtggtacttacccatcacgtcgccgaccacgcgggagcacttgttgtagccgcgatcggggcggtagccgccgtcgtacatcgcgtagatcacacggcgatgcacgggcttcatgccgtcgcgcacgtccggcagggcacgctcgacgatcacggagagggcatacgccagataggactcgcgcatctcctgctgcaggtccttgcgctggatgcgttcgccggtatccatcaggccgtagtcggtggtgtccgcctcctgcgggctcaacggctccatcgagccgtccggcgtgaactgctcgtcgccggtgttgttttcatctgccactgttgttcctttagttgtctaagtccgttgtgtacctccctctgacgagggaggttggaggattccgttacgcatcgatccaacgcacgttcttggcgttgcgctggatgaagaggcggcggggttcgacctcatcgcccatcagcatcgagaaggtctcgtcagccgcggcggcgtcctcgatgtgcacctgcttcagaatgcggtgctcggggtccatggtggtctcccacagctcctggtagctcatctcgcccaaacccttgtagcgctggatgccttcgcccttgggcagctggcgtccgttggccttgccttcggcgagcacgcggtcgcgctcggcgtcggtgtacacgaagtcgtgcgggcccttggtccacttcaggcggtacagcggcggcatggccacgtacacgtagccggcggtgatcatcgggcgcatgtagcggaagaacagcgtcaggttcagggtggcgatatgcgcaccgtccacatcggcatcggccatgatgatgaccttgtggtagcggaccttggagatgtcgaagtcctcgccatagccgccgccgaccgcggtgatcagcgattcgatggtgtcggacttcatcatgcggtccaagctggcacgttcggtgttgaggatcttgcctcgcagcggcaggatggcctgcgtgatcgggttgcggccctggatggcggaaccgcctgcggaatcgccctccacgatgaacagctcgcactcttccgggttggaggactggcagtccttgagcttgtcgggcatgccggcggactcgaagatggacttgcggcgggtgttctcgcgggctttcttggcggccagacgggcgcgggaggcctcgatggccttctggatgatgttcttggcctcgttcgggtgggcgtcgaaccagtcgccgagcttgtcggtcatcacgcgctgcacgaaggtcttggcctcggagttgccgagcttggtcttggtctggccttcgaactgcgggttggtgagcttgacggagatcacggcggtcaggccttcacgcacgtcgtcgccggagaggttctcgtccttgtccttgaggatgcccttgtcacgcgcgtaacggttgaccagcgaggtcagcgcggcgcggaagccctcctcgtgagtgccgccctcggtggtggaaatcgtgttcgcgaaggtgtgcacggcctcggagtaggcggtggtccactgcatggcgagttcggcggagatgccgagcttcaggtcttcggcctcgaagctgatgacgtcctcttccaccggcgtggccttgcgcaccttgaccaggtagtcgacatagtccttgatgccgttgaggtactggtaggtgacggtctggtgctttgcgccgggctcgtccgcggcgtcgccggccacctcgtcgccggcctggtcattctcacgctcgtcggtcaggctgatcttgaggcccttgttcaggaaggccatctgctggaaacgggaacgcagcgtctcgaagtcgtagatggtggtctcgaagatcttcgggtcggcccagaaagtcacggacgtaccggtggactcgccttcggtcatcggctcgccctgcttcaagggcgcggtggggtgctggtcgatgtacgtctgggtccagtggaagccctgacggcgcacttcgatgtccacgcgggtggagagtgcgttgaccacggagatacccacgccgtgcagaccgccggacactgcataaccgccgccgccgaacttgccgccggcgtgcagcttggtcatcacggtctccacaccggagacgccctcgccgggcacctcatcgaccgggatgcctcgaccatcgtccaccacgcggatgccgttgtccggcagaatggtgacctcgatatggctggcgtatccggccagcgcctcgtcgaccgagttatcgacgatctcatagaccaggtggtgcaaaccgcgcgggccggtggaaccgatgtacataccggggcggatacgcacggcctcgagtccttcgagcaccctcagatcggaggcctcataatgctcgggggccatggattcgtcaagttcgccttcggtcaattccgcattgttgatgcgttccgcagccgccttcagctgctcctctttgctggtttcgtctgccaacaggcttccttccgtgactacagggtcaacctccgtcatgaaggtcattcacggaggcgatatggcttacgaggcccgtaaagggctcttctggccatttgaccatactgcatgtgattttactcgtctaacccgacgagcgccatagcgaggcttctgcgaatttgtttggtatcttggctaccgccgccgagcccatttgcgcgtgtatccggcggccggtccggtcacgcgaatctcggcgatggtcaatcctttgagattgcgacggatggtatcggtaagttgggggataaggtaggtcagctgcgtggcccagaccgtggattcggcacggatggtcagtacgccgtccgtgaaatcggcgactgccgaatggctggcgatggcctgccccaccacttggtcccaatggttgcgcaattgcgcaagtttcatattcgccgcccagacgccattgccggcgatggtggtcatcacgctgcccagttcagccggatcgcgccccggtttgccgaagttttcgatggcctcttcacggcggcgtctgtagtccttcaaggtcgccccgcgacgggagagccgctcgaatatttcggccggcagtttggtctcgtccaggttgagttggcgggcgatcggcgggttcatgacgctttccgttctacggacgcgctgtccaccgcgggttttccgtcatacttacccaaactctcgttttcccgcgaatcggacaaattgcccagagttggcagtattacggaagcgggttcggccagtgtggccacgtcgatgcgatgggccgattcatagtcgggcacatcgccttcagcggccacggtaatcagcacctgatcctgttttctggcgaaatcaagaatctgcgtgcgccggctgtcgtcaagctgggcgaacacatcatcgagaatcacaatcggctgcaatcccaaccggtcacgcacgatttcaaacaatgccattttcaaggccaacgccatcgtccacatctcgccgttcgaagcgaactcgcgggcgggaataccggccaactcaaggttcatgtcatcgcgctgcggaccgataaggttcacgccgcgagccatttcaccggggtagatgcgttgaaaatgctcgctgatccgcggatgtggatcgtcgaacatcagcacttcgtcgaatgaaggcgcatatgtgagcgtcacctgctcgccggcaccggccaagtcggcgtaaatcgcggcaaatggctcggcaagcagaccgatcacatgagcgcgcatacgggtcaacgccacaccggcttcgatgaactggccggtccagatttccaaaccgctcagaaccgcatccatcggctgtccattgttggcattggcattcaattgcttcaacaatgtggcacgctgtttggcgatgcgcgtgaactgttgcaacgtctgcatgtatccgggctcgagcagagccgcagcctgattcatcatgacgcggcgtgctcccggatcgccggacaccaatcgctgatcttcgggagtgaaggaaacgctgggaatcttgccgatgatatcgcgcagatacagcgacgaccccgagttgatgcgggctcggttggcaccacgcgcatgaatcgacgcttcatacgtagtggtttgaccggcatcatcagcgacgttcgcgcggatggtggccgtggtctgcccgcgttcgatcagcggcaacgtgctggacgtgcgatggctcgatccggtggacagcacttcgacggcttccaccagattggttttgcccaagccattcttgccgaacaggatattcacgcctggtacgaaatcgaccactacttgactccatgagcggtagtggtcgagtgcgagacgggagatgtgcattagcgaatcgttggaaattcagggatctcagttgttgaagcgcatcggcacgagcaggtatcggtagtccatggactcgtcggaatcagcttcctgctggccgttgaactcgaccggcttgaccggggtcgtcatcttgatgcgcacgaatggttcggtcacggcggacagaccctcc

SEQ ID NO: 2991 - DNA, 11229 bp, Unknown
  R19_24m  MAG No. k141_11867
ccacaatctcccccgcagccttttttgccgtcaatccccctccaagccgtaagccaagttcgcgttcgacttggctgagcgcgcgcagggcggccacgccgagcgcataggtgatgccccattcgtcgatctcggtgttgctggcctggcctacggcgtaggccgcgcaccagtcgcgcagttcgtcgaaaatcgcctcgcgcctatgttcggtgagcattttggagtcggccacgccgtccggcacgccgaggtaggtccgcccggacagttcgacggcatcatcgccatccaacggctccaaatcacgggcccagatggcggcgcacccgaccatcaccgggccggcgagcgcgccgcggccgacttcatcgaatccagtaataaggtcatagccctgggccgcaaggctgcgttccaagtcaagtgtcggggtaatcatgcgcggctcccatcgtctcacaatggttaggattcagacggtccaggttcaaatggttcaggattcagacggcccggaactcaatcgttcaaagactcacacggttcaaaaaagactcaggaatttgagccggaagcgtcaggcacgtccttgaagacttcgtggtggtcatcaatcgcaccaagccggtcaagcggccagtatctcgcgattccgactccgaccacatcggagatgggaaccaagccgcgatcgccgtcatcctgatgatagcgggagtcggcggaattggcgcgattgtcgcccatgacgaacacgtggtcctcggtcacggtcaccgagaacgggaaggcgctcgggtccacgccggggcgaatgtaggaggtctcattgatggccacgccgttgatggtcaccggctggcccgcgcccttgcattcgaccacgtcaccgggcaggccgatcagtcgcttgatgaggtacccgccaccgggagcgctgctctgctcctcgttcaaccagttgttgggatctttgaataccacgacgtcgccgcgctgcagatcgaagatcttgggggtgagcttgctggtcaccacgcgatcgccgggcaccatggtgtccatcatcgagcgcgaaggaatctcgtaaaagccgacggcgaaaatgcgaatcagcagcacgataagcacgggaacgccgcaccacaggaaaaagtcgcgtagggtgaagtggtcatcatccatcgatgatgctgccgcggcattcgcgccagcggaagaagcggcgtgcgccgggcgcgccggtgccgggggaaccggggacggggcgatgccgtggtcggcgacttggaacgtacgggaatcgcgggcatcggcctcgtcatcatacgaggtctggttgctctccggattgtcggaaatcgggaattcgccgttatcctgatcgtcctgcataccatctcctcgcgattcatgctgccggatatgaggggtgccggcgcccgtccatcatacgtggaaaatacggaaacagcccgaaaccgaaacggttccgggctgaatttcacggtttattcgcgcacctgcatcatcaggcccacgattgcacccgcgaatcgactcacttagcggagttgtcgcggcgctcggcaatacgagcggccttaccgcgcagagcgcgcaggtagtacagcttggcgcggcgcacacggcccttacgcacgagcttgatggagtcgatggacggggagtgcaccgggaagcgacgctccacaccagtgccgaagctgatcttgcggaccacgaaggtctcacgcacgccagcgcccttacgagcgatcaccacgccggtgaaggtctggatacgggagttgttgccttcctggatcttcacgttcacgtcgacggtgtcgccgggacggaaggccgggatttcctcagccggcttcatgtgcttggcgtcaaaagcctcaacagcgttaaccattgttttccttcagtgctgccgcatatcagccacagatctggggccatccacgcgattgcgcatcacgtgcgttggcctgttctcgttatccctcgggtttgcccttgggaagcctgccgatccgccgaaagtcaggccttgcggccgttcggactggacccatggagacgtgggcttatgcggcggcccacttctcgacacagcaatcgtcaattgtacggattattgcggacagaatggctgcctgatggcattccaacaccaaggcactgcgacgtagttgacagacctgcaggcgggctttatcttgggagcgtcggtaggcgaggctaccgcagggatatgggttgctgccgctaacagtggagacactgcacgcaggtcagcagttcttgtcggatcaaggcatgaactaacgcaattccaccgccctgcgatgctgaagcttgaacgatggctcgaatcggcggattcgaatactttccgcccctcctgctggtcgcatggataccgacgatggtattgatctggcgtttcagcgcacggcttgaaggaggtgagagtccgatggacggtgattattccagtagttccgccgccggcaacagtcatagttgcggtggtgatgaccatgttttcttgtattccgttatccggaagtcgggctctcgcctgtagtgttccttggctccccggataacccttgcataattcgtctttcctatgcatagggaggtcttttcatgaccatgttttcattcaatcgcgtcggcgcgcgtccaaatgcgtcggcccgcaacccttccaccgccgcgtccgaccgccagccattcgccgtgcgcctggcctccgacgtactggtcgcggccggtattctggcgctgttcggtctgatcgcttggattctgccggcgatcggcgaaccgatcggcccgaaaggcgtgccgtcacaagtcagtacgcatctcgccgacctgccgtattacgcgctgcgctcggtgttccgcatgctcgtggcactgttcttctcactggtgttcacgttcatctacggcacggcggccgcgcgctgccgccgcctgagccgcgtgctgattcctctgttggatattctgcagtcggtaccgattctgggctttctttcggccaccatcaccatctggatggtgctgttccccggctcgatgctgggcgtggaggccgcgtcgattttcgcaatcttcaccagtcaggcctggaacatggcgttctcgttcacccggtccctgaccagcgaaccaactgaactcgacgaggcggcccgctcactacagctcacacgctggcaacgattctggacactggacgtgccgaacgcgatgattccgctgctgtggaactgcatgatgagcgtgggcggcggatggttcttcctgaccgcctccgagatgatctcggtgaacaatcgcacctatgcgttgcccggcatcggcagcttcgtggcacaggcggcggccgaggagaatctcgcggccatctgctgggccatcgtgacgatggtgctggtggtgctgcttatcgacgtactgctgtggaagccgctgaccgcgtgggcggagaagttccgcattacgcaaagcgagtcggcggtgcgcaagaccagtgtggtgctgaccatcattcgtcagtcacatatcgatgagatggtggcctggctgttcaggcctctcggcgacctgttcgacacgctggcccgcccgttgggtcggaccggtggacgttgggcggcggacgtgaagtccgcacgcagccgcgcgcttgacgtggtattcacagtgctggtgttggcagcgtgtgcgttcggactggtgcagcttatgctggtgattcatcgcgatgcgggattcggcgagctcgggcaggcgttcgtgttgggcatggtgacgttcctgcgcgtggcgctgcttacgctcgtctgctcggtgatttgggtgccgattggcgcgatgatcggcatgaatccgcgcgtttcgcggtttatgcagccgattgtgcaggtgctggccagcttcccctcgaacttcacgttcccgttcgtcacgctctggttcgtggcatgcagcgtggatatcaactggggcagtattctgctgatggcgttgggcacacagtggtacatcctgttcaatgtgatcgccggggccagccagattcccgacgatctgcgtgagatgacgcgcagcttccagctggggcgctggcagcggtggcgcgatttgattttgccggcggtattcggctcgtgggtcacgggcggcattacggcggccggtggggcgtggaatgcctcgattgtctcggaaatcgtaagttatggacggcatacgctgaccgcctccggcttgggcgcgtatatcgccgaggccaccgaaagcggcaacaccgtgaggaccatcatcggcgtgaccgtgatgagcgtgttcgtggtggccgtcaaccgcttgttctggaacccgctgcagcgcatggccgagcgccgtttcgcactgaactaaagacttaaggagaataatatgactgttgcaatggaaaccattcgttcgctgcgggcggtgaccccgcagaacaccatcatcgaagcccagcacgtcggccagcgcttcacggccgacaacggcaccgaactcaccgtgttcgacaacatctcgttcaacctgtacgagggcgagatcgtggccattctgggccgttcgggtgccggcaagtccacattcctgcgtgcgctggccggactggtcaagccgaccagcggcacggtcaagtatcgcggcgaggccctgaccggcccgaatcccggcatcgcactcgtgttccagaccttcgcgctgatgccgtggctcaccgtgcaagacaatgtggaactcggtctgaaggcgcgcggcgtaccacgtgcggaacgcaccaaactggctctggatgccatcgacatgatcggcctggacggcttcgaatcggcgtatccgaaggaactgtccggcggcatgaggcagcgcgtgggcattgcacgcgccttggtgctgcggccggacgcgctgttcatggatgagccgttctccgccctggacgtgctgaccgccgaaaacctgcgtcaggaagtgctcaagctgtggtcgagcgaacagcgcagcatcaagtcggtgcttatggtcacgcataacatcgaggaagccgtggagatggccgaccgagtggtggtgttgggctcgcacccggggcatctgattgccgatgtgcgggttgatctgcagcgcccgcgcgaccgtcgcagtgtcgaattcgaggcgatggtggaccgactgtacgcgattttgaccggacaggcctcgcagcctacgcaacaagccgaggctctatcgccatcggcatcgctcacgaacgcacccgtcacggacgcatctgtcacggacgcatcagaccttcagcccgccaagaccatcgagaaaatcaaggagcatccgctgcccaacgccacgccgggcgggcttgccggtctgctggatgtggttgccgagcatcctcacggcatcgacttggcagatttggcctcggctctttcgttcgaggtggacgacctgttcccgctggtggatgccggtacgatgctgcgcgtcatcgtggtacgcgacggccatgtgcagatcaccgaggcgggcgactcctggcataaggcggacattctgcgggccaagcaggtgttcgcctcactggcgatggaacacgcgccgctggtgcacaacattgagcatgcactgcggaagtctgcggaaggcaagctccgcggcgagctcatgctggacctgctgcgcgcccgttacgccaacgacgaggcgcatcagcagttcgccatcgccgtggagtggggccgttacggcgaactcttcgattacgatgccgatgacgatctgctgagcctggatgaggcgaataagggcgaataagcgaatcagccacgtgagttggctagatagtgcctttatgcctgcaaacagatgccgaagcggaatatgaccatgttcgactcatctgactgacagcaatccgtatatgcaaagtgcccggcatccgaagatgtcgggcactagtcgtgagagagactccctcagtcagctacactgacagctcctctcacccgagggggcaccagaggaacgaatcagaactcgcgacgtgggcagtcgccagactgcccaccagacagcacagccgcggtcgcgcgaatcacgaattctgaccgagcaaagcgaatcagaactcgcgacgtgggcagtcgccaggctgcccaccagacagcacagccgcggtcgcgcgaatcacgaattctgaccgagcaaagcgaatcagaactcgcggttggcgcggtagaacttgatcaggctctgggtggaggcgtcctgggcggcgagggcgtcgtcgtcctgggagatggccggggtgatctgcttggccagctgcttgccgagctcgacgccccactgatcgtaggagtcgaggccccacacggtgccttcgacgaaggtgatgtgctcgtacagggcgatgagctcgccgaccgcgaacggggtcagggccacaccgaagatggaggtggtcggacggttgccggtgaacacgcgggccgggacgatctcctccggggtgccttcggcgcgcacttcgtcggcggtcttgccgaacgccagggccttggtctgggcgaagtagttgcccaggaacagctcgtgcacgtcctggtcgccgtccttggtcgggttcggggtgttgacgaacgcgatgaagtcggccgggatgagctgggtgccctggtggatcagctggtagaaggcgtgctggccgttggtgcccggctcgccccagaagatctcgccggtctcggaggtgacgggggtgccgtcccaacgcacggacttgccgttggattccatggtcagctgctgcaggtaggccgggaagcggtgcaggtactggtcgtacggcagcacggcgtgggaagcaaccttgaagaagttgcggtaccagacgttcagcataccgagcagcaccacgacgttcttctcgaacggggtgttggcgaagtattcgtcgatctcgtggaagccgtgcaggaactcctcgaagcgggccgggccgaagacgacggccagagaggtgccgacggcggagtcgacggagtaacggccgccgacccagttccagaagccgaacgcgttgttcgggtcgatgccgaattcggcgaccttctccaggttggtggagacggcgacgaagtgcttcttgatggcttcggcgttcttctcgtcggagccgtcgatggcgcccttggccttgagctcttcgagcagccaggtgcgggcttcacgggcgttggtcagggtctccagggtggtgaaggtcttggacacgatgatgaacagggtggtctccggatcgaggcccttggtcttctcggccaggtcgttggggtcgatgttggagatgtagcgggcggagatgcccgcgtcggcgtacggcttgagggcctcgtacaccatgacgggacccaggtcggagccaccgatgccgatgttgaccacggtttcgatcttcttgccggtcacaccggtccactcgccggaacggaccttgtcggcgaaggcgtagatgcggtcgagcacctcgcgcacgtccttgacggtgtcctgaccgtcgacgatgtacttgccttcatcctcgaccgggcggcgcagcgcggtgtgcagcacggcgcggtcttcggtgttgttgatgtgcacgccggtgtacatagccttggtgcgctcatcgagcttgacggccttggcaaggtcggcgaacagctggagggtttccggcttgatcaggttcttggacagatcgaagtgcaggtcgccggcgtcgaaggacagcttctcgacacgctcggcgtcctcggcgaaccacttcttgaggctcacgccttcggcctgaagctcgtcatagtgcttctgcagggcagcccactcaggggtctgggtggcgtcaacgggcggattgatggccataggattccattcctttcatcagtgactggagcgccttcgctcacggctcggatgcgctccgtatcaccaaacagaatactcacaaattcggacatgaacagaacaaaaatcagtcagcgatgtcggattgccatcgtttgcattatcgaacagttcgtggcgcggcacaaccgtcatcttcaaccgagcggtcacgacacaactgccaagccgccgattggacttttcacggagatgtcttatacttaatttcttgtgcgcggctggcgaaatgccttccgcgaaccaagccactttagctcagtcggtagagcggctcactcgtaatgagcaggtcgtcagttcgattctgacaagtggctcggatgccctaggctggctggtctgtaatggctgtccggcctagggttttgtatatcttccacacctgtggaaacgcggatatgcacgcgcgagtggcggaattggtagacgcgcaggatttaggttcctgtgtctttgacgtgtgggttcaagtcccatctcgcgcaccggcttgagcctcctggaaacattggatcgccaacgattccgggaggctcttcgtatatgcgtgaggcaattgcaagcccttgcggacgcctctacatatggcaatgccaaggcggcaaatataatggtcacagcattgtgggtctgagcctgtgcgccgtgagcctgtgtgagccaaggagagaagtgtatgtccgccattcttacgccggttggcctattgctgatcattctcgccggctatctgttcaagcggttcggcctgttcgggcagaaggattatcgcgtgttgcaaaccgcggaattcaacatcgtgctacccggtgccatcgtatactcgttcgccaccaatccgcatgacatctcgctgctgcttatttcggtattcgcattcctgtttgcttttatcccgatcgtgttcatctttctggccacccgcaagcgcaatgtgaccgaccgcgccttcctgatgctcaatggcgccggcttcaatctcggttgtttctctttcccggtcgtccagtcattctggggtgcgggcgcggtggtgccggctgcgatgttcgatatcggcaactgcgtgatggtggccgccggcaccaatgtgctcacccagcaactgctgcatattcagcccggcaaaacacttgccgaacaacacgccggttcggttcccaccttgccgtacgaaaagcccaaggatcgcgacgccaaacggcttgcccgccgcgcattgctgcgcaccatcggcaagagcttcttcggctcggtgccgttcgacacgtatctgctcatgatcgcgttgaccgtcgccaacgtgaagattcccgattggatcgcctctataacccagccgttgagcggtgccaacgcgctggtgtcgatgctgatggtgggcatgctcatggatttgccccagtccaagcatgatgtgaaggaagtcatggccgtcatcgcttggcgtataccgttcagtgtcgccttcgcgttgatctcgtggttcctgctgccgttctcggcttcgattcgcgccgtgatggtgatctgcgcgttggctccaatcgccattttctccacgctgttcaccgacaaagtactcggcaacgccaaactggccggcttctcgctggcaatcaccgcgatgatttcactggtgatgatggcatttgctcacgcgctgatgggcgtgtgagcaaatgcgcgaataggcacacgacgggcgcacggcgggcacacggtcaggcgagacgcagcccacataggttcgtcccccggccgccagctgctaccggtgcagcagcttgtgcgccagattgctcacgccgaagcggaacttgtccaccggcaacgtgaatttgcctaccatctgctcgacgtagccgttgaagccctgcttgaattccagcacgccgcggccctcgtcgttcggatcgtcgaacacgccggaaatgccgtagaagttgtagcggctcacaccctgttccacacacaggtgcagcatcgcttcgtactgaatcagcgccgaggcgtagaacggcttgtactcctccaacgaaccggaatactgatagaccacctcattggggtgactgacgaacattgaagccgctgccggcagcacatcgcccttcttggcatatccctccacctcagccagacgcttgtcggcggccgcgagattgcgcgattcctcccccagctgacgttcgatgcgcgtggtcggacgttcatcgtatttcgtctgcagctgtgcgaccttggtctgcaaggcctcgcgcttggcggtcatatccgccacatattcggcgatgtggatttccgcgagcatgaaatgcgcatccgcgccatacgcctgcttgaactggcggaaatagtccgcgccgcgcgtcgcgaacccgcggcgttcaccggtccgccgttcgatatcggcgaacacgtcgaactcgtcggggccgatttcgcgaacgtgcacacccatcgactgcgcccgcttgacgctccattgagcgcgtttgccgaatgatgccagcagttccttgccgttggtgatgccggtgagatccttgacgtacatccactggcagaccacgtcataaccggtatggaatccgccatgcgcccagcctgcatcggcgaatccggtcagcagtgcatcgttcggctcgccgtcgggctgtccgtccgaggaatacagacggtaggcgacgttaggccagcatgccacggaaacagcatggtggcgacgggccgattcacgaatcgcctcggtcatggtccatagcagagccggatcatcgctaatgccgatggggccgaaatatacggagccatctgcaccgaaacgaccattgaggtacagaatcacgcagccggttaccagattgccggatgcgtcgcacacgccaacgcattcggcttcatgcccacgaatcttggcaagacggacctgcccggaccattgctggaagctgccctggcttgtggcttcggaaagccggtcgagctcttcgggcgtaatcacgccaaacgtatacgtcgtatctgttcgattcacagtcgcgctcatctcgtcgtcacctgtgccttatttctgtgtccgtgctcgccactgtttgtcagcgatgcagcagcttgtgtgcggcttcggatacaccgaagcgcagtccgtccaccggcagcgtgaacttgcccgga

SEQ ID NO: 2992 - DNA, 7444 bp, Unknown
  R19_24m  MAG No. k141_12023
accgttgtcccgcgcggcggccatgagaatgcccatgacctcgcggccggtggcttggtcgagcgcgccggtcggctcgtcggcgaagaccacggcaggtttgacggcgagcgcacgggcgatggcgatgcgctgcatctggccgccgctcatctcccccggtcggtgcatggcgagtgcgcgcaaacccatacgttccagccacagaatcgccgtgtccgtggcggtgcggtagggcacgccgtcgagcatcattggcagggcgatgttttcgacggccggaagttcgggcagcagttggccggattggaagacgaatccgaagacattacgacgcagtttggtgcggtcggcgtcgctcatgcggctcaggtcggcaccacggaagatgacggtgccggcggtcggcttaatgatgccggcgagtgcgtgcagcaaagtggatttgccggagccggacgggcccatcacggctactgtctcaccctcccggagcgtgaagttcacgtggttcagggcgagcgtgtgcatggtcggcatggcgaagccgggctgggctggctggccggcctgaatggcacccggtccggccgcagcgggattcgccgacgcataaccggctcccgtgccggctggcatcacgccggtgacgccgtgccctgcctgtgcgcgggccatgctggcggtgtagtccatgaccaggtcgtgcgcctcgatgaccggggcccactgctgggtgtgcgatgccggctgctggaactgttggggttgctgagactgctgaggctgagccgccggtcccgacgccggctgaggctgctgcaattgcgatgctgctgtgttcatactcccgagcgtacggagcgaacgcccagccgaccatcgggctgcggtatgaacctttctggatcaccggcccgctcctcatccgcaaggattagagatacgcagtcgacgcgacaatccatatatcagatgttcattgctcgagaagacgaggaacagtggaagaccggttcggaagctggaaccacaacagaccaagcaaaggagcccacatggccatcgcaatcgacatcccgcacacaccaatcgtgtccgtacaaaagtcgtacaacaggagtacgactacagagaataacaagaacagtcgttttgaaatgagactcacctaagagcaacgttccagaatcgaccaagcggccgagtccaaaggcatgacttcgttgcaatgggcattatcgaatctgctcgccgccgcagatcgggacatccatgaagctcatatcattcggctcaacagtaaagcgtggaatgatttcaccgcagcattaaacgaacctatgggcctacgtctgaatgaattgttggagcgtgatcccatatggacgtgaccaacttcactgagcctcggcacctgactgcgagcgaggatatttctggtttcgactgcggcctgccattggtcaatgattggctggtttccacacactaagtgcatacagcattgagcattcggaagctcccggttggctgaggcgaaatagtccgaaccccattcccgtaattttgctaggcatgatgggcgtggatatcagatttcaaaccatgcacgtcgacagtcagttactccgagatgcggtacttcattctctgaacgatatgattttcggcatatccctgaatcatctagaatgtttactccgctcaatgtccacaatcaccaatgattaatggctggagaccgctatttgacgccgaccattgtctgaatcgcattcagacacaacactcctcattgcgcgcagaccagcgagttccgccgagtcggcgatgtgtctcttcggcggttgatttaggattttccgcatgcgacagctgaccacaccgctaaaaatgccattttcgcactgacttggggcggaggtcgtggcgaaacgcacgagggaacgtgtgtcatccgatatggtcatgcccgccagacattgaagcgtcctgtctatgcgcggttgatgtcccggcggcggggtcaatcgatcgacatacgaaccgggacagattcggctgtcccggttcgggatttcggcctcttttggcgaaccgggacaggcccttccatgaacacccgatatatgcaaatccaaaaccccggaattccgccattccccgacggcgaccatcgcacgatagggcgtcaggtgaatgagattctgtcccggttgcccaaaaagaggcaaaatgacgaaccgggacagcgaaatctgtcccggttgtcccaaaagagacgaaatgacgaaccgggacagcagaatccgtcccggtccacacgcggttcacacggcattacccaagtgaactcatcggcaaaacattggcccagccaacaccactaccgatgtccagcacaggccagctcgtccaggcgggcggcgaagcggggccagtcggtcttcatagcggtgaggagcttgcggttgggcacgtcgtcaatcgggacccagcagatttccatgctttcgtcgtcgtttgccttgggctcgacggtgtggccgggcttttcaaaggcaaacacggtggtgtaggcccacgggccatggtcctcgcggtaggagccgaccacctcgatgtcttcgggggtgatgttggcttcctcgtagctttcgcgcagcgcgccttcgatggacgattcgccgtccgcagtggcaccgccggggataccccacgtgccaccttcggcgctccacgcggcacggtgctgcatgaccacgtgagtcaccttgccgctcgccgggtcacggcgagccagcagaatgccggacgcaccgttggtgccccaatgcttgcggccgcaggcgcagtccacccagccatcgccgggctgatgcacgttttcgaccggcggcagaatgccagcgtgctggttgcccgaggccttgctttccggctccagttcgccacggccgacattccacaggtcggtccacgtgatgcccagttcgccggccagatgccgggccagcggcaggctgaggccgatgataccgtgcggatcgccctcgatgctgtcgatgaacgcgccgccgaagccttccagcgtgaacgatccggcgacttccagcggctcgccggtgacgatgtaccgttcgatgtcgtcatcggtgaattcgccgaaatggactttggcatggcttgcgccgcgcacggtacgtccggtcgcgaaatcgatcaggcagtggccggtccacagttcgccggtcgcgccgctcatgcgcttcagtcgttctcgggccacggattcgctgtgcggcttgccgtagcattcgccgtccaggaggaacatcgaatcacagccgagaatcagcgggccgaccgtcgcctcggtcagtcccggctgtccggcaatagcggtggcgatgggttcggtgatggtcggcatgtcgatgccggagaagtcgcgcgtggtggcgacttccgccttggaatagtcgatgggctggccagcggcggctttgcgcaggtcttcgacggcagcttcgcgttccgaatccttgatctccttggccttgagcgggtaggcgatcacgcggtcaccggtcgcggcggcggcagtatcggccacatcacgatacgcacggtgaacggcctcggccttggctgcggcaagaatcatcacacgctgcttgatgctcaaatcgtcaacggtgacaccttcctcacgggcggccgcttccagcgcagcaggctcatccacgtgcgagacgcgaattgtggggcagatacccgccgaatacagcacgtcacggcgaggcttggacttggaagcaagaattagcggaatggacatgacttaagtccttatgctcccgctggcgggagctgtcgaacgaagtgagactgagggtggtctctgccggtatggcggaccactctcagaccgcctgcggcggccagctcccgccagcgggagccttctcctcgacttagcgacgctcgatttcgacgccggcggtgttgatgggcaggtgaagcacacgccagtggccggaagcaagctgctccgatgcgatctggtcgatggcttcgcgggcgttgccgtagtgcagcacgagcacgcaggggccggcaccggagacggcggcggcatagcccttggagcggaagagcgcaatgagctcggtggacggcggcatcagggtaccgcgatacggctggtgcaacttgtcctgcgtggcggtgaacagtagcgcgttggactgggcctgagcggccgcaagctcgtcagcgaacggcgattcacgggttccgccagcgcaagcgcacgtatcggcatcctgagccggggcagcggcgacgccggacttgccctgctgggcggcctgggccagcaccatgggattcatcgcagcgggcagcagacccacgcgagacacgttgtagacggcgtccttgtatggcagttccctaggcagcgcctgacgggccttctcagtggacagctcatagtcgggcacgaacacggcggcggtgatggacgggtccaccgggtagttgacggcgtggaatccgccgtgcagcggttcaccaccaggaacggcgaccgagccgacgccttccgcggtttcgaagtcccaagagacggtcaggccaccgaacacagccggggccacattgtccgggtggccttcgatctgggcggccatatcgaagatggccggacggttgaggtcaccggtctgggcgaaggccgcggcggcggcgatgccggccacgatggcctcggcggaagagcccatgccacgagcctgagggatgttgttggtcgcttccagcgtgaagccgagtcggccgaggccgaacgtggcacaggcacggcggaaggtggagaccacgaggtgggtttcgtcgcgtgggagggtgtcggcaccctcgccgtggatgatcacgtgggcaatgccgtcgttcgggtcgtcgttgagcgtgaaagtgagctcgtcatggtagtcgagcgccagacccacggtatcgaagccggagccgaggttggcggacgtggcgggcacgcgcacgtgaacgctattgcagattgggttcatggttgttccttaaaaaggagctccccttgtcaggggagcttgggtattcagctttcaactcacgggcagccgttcgaccgcctcatcagagggagcctagacggtgtcagtccagcacgcgcaggatggacgggtcaccggtgacgaagtcgagcgcctgcacggccttgacggtgttgcgcagggtttcctcgtcggtcaggtgggtcacgatgcgcaactgctgaatctcgccgtcgtagccggggtcggtcatggtgggcttcagatcctggttcacaccgttgatggagacaccgttcttggcgaactcggcggcgatggcggccagcacgcccggcttgtcgtggatcaggaagcgcacggcgaatgcagccttggaggcggtaatcggagccttcggcagattcttgtacagcgggatggacgggccggtgcagccagcagcaatgtggcgggcttcggtcaccacgtcgcccacgacggcggaggcggtcggagcgccgccggcgccacggccgtagaacatgaggtcgtcggcggcctcggccttgacgaacacggcgttgaaggagccgtgcacggaggccagcgggtggttctcgtcgatcagggccgggtagacgcgggcggagacgccggcctcgccgttctcgaccacggcgagcagcttgatgaccttgtgctcggcggtggcggcggcgatgtcgtcggcggtgatcttggtgatgccttcgacggacacgtcgtcgatggtcacggaggtgtggaagccgagggtggccatgatggcggccttgttggcagcatcgtagccttcgatgtcgccggtcgggtcggcttcggcgtagcccttggcctgggcgtccttgagcacgtcgtcgaactggagacccttggtggtcatctcgtcgagaatgtagttggtggtgccgttgacgatgccgagcatgctggtcaccttgtcgccgaccagggactcgcgcagcgggcgcaggaacggaatcgcaccacctacagcggcctcgaagtagatgtcgacgcccttggcctcggcggcggagtagatctccgggccgtacttggccagcagcgccttgttggcggtgaccacggaagcaccggattcgatggcggcaagcacgaacttgcgggccacggtggtgccgccgatgagctcgatgacgatgtccgagttggtggccacgctcaaagtatcggtggtgacgatggactggtcgatccacgggaacttctcggtttccttcgggtcgaggcaggcgacgccggtcagttcgatcgggcggccgatacgagcggacagttcgtccttctgctcgacaatcaggcgggcggtctgggagccgacggtgccggcaccaagcaggcctacgcgaatcggggtttcgctgttgtgagccaattcagggtccttccaaaaagttttctatatcccacgcctattttacggattatttccgacagcagaccgaaagtactcatcaagctgacggcccttttcgtattatgacggttttggccgcacattacagactgtcaggcgctcacctctgcacgctgattactcgctgacgtcgaggttaagtaggtcgtctacggtctggcggcggagcatgacgtgcgcgccggactcgctgacagcaaccaccgccggaatcagcgcctggttgtagttgctggccatggtgcggccgtatgcgccggtaaccggcacggcgagaatgtcaccgcgcttcaaatcggcgggcaactgcacctcgtgaaccacaatgtcgccggattcgcagtgcataccgcacacgcgggcgagcatcgtttcagcggaaccggtgcgattcgccagacgcgcggtgtagtcggcaccgtagagtgccgggcgaatgttgtcggacatgccgccatccacggacacgtacacgcgctcggcaatcgggttgccggcactgtctttggcatcggacaagtgcacgtgcttgatggtgcccacgcggtacagggttacgccggcgggtgccacgatgtaacggcccggctcgaagctgatggctggcgcgggcatgccgagcgcacggttggtgctgttgaccgcatccgccaagcgagtgagttccacgtcaatgtccattgaatcttcgccatcggtgtaggccacggagtagccgccgccgaggtcgatttcgggcaggatgtaggcgtcggtggcccacagggtcttgcgcagcagcatcatgcgcttggccgcgtgaatgaaggcgtccgcatcgtggatgttggagccgatgtgcgagtgggctccgaccagttcgagtacgtcctggttggcgaggatg

SEQ ID NO: 2993 - DNA, 7264 bp, Unknown
  R19_24m  MAG No. k141_12071
cgaaccgctcaaccccaaggaggttcaggcctgatggaagtcaccagcattcagaacggcatcatcatcgaccatgtgccggccggaacctcgctgaaggttctcgaatacctgaaaatcgacccggacaaaaccaagcttgcgctcatcatgaacgccaactccaagcgttacggctccaaggacatcatcaaaatcgaggatgacaaggacatcgacctcgatgtgctcggcttcgtggcccgccaggccaccgtagacgtggtgcgcggcggcaagatcgtcgaaaagaagcagccgaacctgcccgagcacatcgtcggcgtgatctcctgcgtgaacccgcgctgcgtgaccaccaccgagcccggcatcaagcagatgttccacctcgtgcactccgaacggctcgaataccgctgcgactactgcgacgaggaagccaaactgtgagcatcaccctacgcaacatcaaggtctggaacaccggcgaagtcatcgacctcgtggtgcccgggaccgctgccgcctacttcgccgacacctccgccgtggctgacggtgccgatatcgacgccaccggactgaccgtggcccccggtttcgaagacccgcacgtccacttccgcgatcccggccagacctacaaggaatctatggtctccggctgccgcgcgtccgcatccggcggatacacgaacgtgctcatcatgccgaacacgttgccggcactggatgggcagaccgtgtctgacctggaagcggccggtgcgaaagaggttctggatgccggcttcgacaacgtcatcgacttcctgcagcagtacgatactgcgcacgatgttcaattgccggttcgttacgatctgtgcgtgtgcgcgtccaaggatcgcgccggtcatgaggcaagcgacgttgccgactggctcaggtacgtgcccggattcgaggacgacgccaagacgccggccatgctcacgcaccccatcaccgcaattagcgacgacggttccgctgtgacgccggagatcctggaccaggtgctggagaacgtcaaggcctccgacctgtacctaatcgagcattgcgagcatcacgatacaggtgccgtgaacgaaggcccggtctcgcgcgaacttggcgtgcccggcattccggaagacaccgagctcaagatcgtggcccgcgatatagaagcggcccgccgcactggtgtccacgtacacttccagcatgtgagcactgccatctcgttcgaggcgattcgcaaggccaaggccgaaggattgccaatcacctgcgagaccgcgccgcactatctggcgttgagcgacgaggcgctgctcaagtacggcacgctcgccaagatgaatccgccgctgcgctccgaagcagaccgcaaagccaccatcgcggccatcgccgacggcaccgtggatctgctggccaccgaccatgcgccgcacacgttggcagagaaggaactcggcttccttgaggcgcccaacggcatcatcggactggaatgcgcgtacggcgtgtgccacaaggtgctcgtcgacggcggcttcatttccgatgagcgtctgatcgagctcatgtccgtgggacccaccgaactcatggggcatgtgccaaccgacgtggccgcgctggtcgaggactacgccgaacccgcgcccactggggatgatccggatggcgtgattgcgggggagagcgacgctcagccgcagcgtgaaggcgtcaaccgactgctcgacctgagccgcgtggatgacgccgacaatgtcgacctcgtggtgctcaacaccgctgaggaatggaccgtggaccctgaacagttccactccagggctcgtaacaccccgttcggcggctggcaggtcaccggacgccccctcgccacgatcatcggctcccagctgatgttcagccgtctgtagataacataaggagcagcatggatcgcctgatcgaagcgattgacaacactcagaaccccagcgtcgtgggcctcgaccccaccgaggcgttggtaccgccgcaggtcgtggcgagctttgccgacgaggtgcgtgactcggtcgaatccccggaggaaatcgaatccgcgcagctggccgtcgcctacttcgaatacaaccgcacgatcatcgacgccatcgccgacatcgtgcccgccgtcaaaccgcagatcgccatgtacgaggcgctcggccccgccggcgtggacatctacacgatgacctgtgaatacgcggcccagcagggcctctacgtgctcggcgacatcaaacgcggcgacatcggctccactgcagccgcctacgcccaccacctgaacggcgtgggcgacttcgacccgtggcatgaggatgcggtgaccgtcaacccgtatctcggcaccgacggcatcaccccgttcgtcgaggccgccgccgaagccgacaaggacatcttcgtgctcgtgcgcacctccaacccgtcctccagcgaactgcagatgctcgacctggccgacggcacgaaggtctacgagcatgtggccgatctcgtggaaggctggggcgccgagaccatcggcagccacggctactcccgcgtgggcgcggtggtcggtgccacccaccccgaggaaggcaaggcgttgcgtgaacgtatgccgcacacgttcttcctcgtgccgggctacggtgcgcagggcggcacggccgcggacgtggcaggcatgttcgacaagcagggcagcggcgccatcgtcaactcgtcgcgcggcatcatcggcgcatggaagaagagcggcaagtactccgaattcatgaccgccgacgaggcgctggaccttgtggcgagcagcgcgcgccaggcggcgctcgacatgcgcgataatctgcgggttgccgtatataggtaggtagattgtccggctgtgggctatacgtgagtgtgggctggaaaccggagccgagtgtgtttaactacccctcagtcaacctgcggttgacagctcccctgatagggggagcttgatgtgctgaataggaatgaaatgacaactttcacccccacccatgatgtggttgcggaggcgactgcggccggattcttcccgccgcgccacaacgtcgaaatcacgcaggttacggaactgaccgaccgcgtgatgcgactgacgttccacgacccgttcatcgcctcccacgccaagcccgcccagttcgtcaacctgttcacgcacgacgacttcatgctcatgccgcgtccgttcggcgtcagcgaagtcgacggcgacgaagtcagcgtgatcttcgccgtcgtgggccacggcaccgaacagttggcaggactgcaagacggcgacaccgtcgacgtgctcggcccgctcggccgcggcttcaacctcaaggaagacgccaactacattctcgtcggcggcggactcggcgtgcccccgctaatctacgccgcgcaaaagctcgccgaacacgacgcctcctttgccaccgccgtattcggctaccgcaacgaccacttcgctgaggaatacgtctcccggtacgcggactggtcgtggagcatcgacgacgccgaaggcaacgtggtcgacctgctcaacaaactcgaacaaggcgacgacctgaaggcctacgatcgcaagccgatcatcttgtcctgcggaccgctgcctatgatgaaggccgtggccgcttgggccgccgaacgcggcatccccgcgcagctgagcatggaacagcgcatgggctgcggctacggcacctgcgtgctgtgcaccatcgacaccgtggacggccggctcaaggtctgctccgacggacccgtgttcactcgcgaacagctcggatggggggagtgacgatgagcgcaaacaaccagtccgcgcagggcagcgacaaccacatcaacctgtacgagccccacgtgtggaagcaccacaccaaggtggccggtctggaatggaagaacccggtcggcaccgcctccggcaccttccagtacgccgccgtccgctggttctacgacgtcagccagctcggcgccgtatgcaccaagggcgcctcgcccgtgccgtgggagggcaacccctcgccgcgcaccgccgaatcgccggccgcgaacatcaacgctgtgggcctgcagaaccccggcatcgaccattacttggccgaagacctgcccaagctcaaggccgcgggcgcgttcgtcatctccaatgtcgccggacattgcgatgacgattacgcggcggtcgtggaaaagctcgccgactccgacgcggacatgctggaaatcaacgtcagctgcccgaacgtttccgccggcggcatgagcgtgggcaccgacccggtggccctcgccaatcttatggaccggctgcgcccgatgaccgacaagccgatgatcgtcaaactcacgccgaacgtcaccgacatcaccgtgccggcgcgcgcggccgtggaacacggcgccgacgcgttgagcatgatcaacacgctcaaaggcatgcgcatcaacattcgcaccggccagccgatcatcgccaacgtcaccggcggcgtatccggcccggccgtgctgccggtcggcctggcagccgtctatcgggtgcgcaccgcactgccggagattccgatcatcggactcggcggcatcgacagtggtgagaaggcgctcgaatacctgtacgccggcgcgaacgccgtcgaagtgggtgcggccgcgctcttcgacccggtggccccgctgcgcgtcgcccgcgaacttgacgacctgctggacagccgtcccgaactcgctgctaaactggccgcaggacagacttggaggtaaggaacatcatggcagaaacactcgcacatcgcttcactgaattcctgttggaatccaacgcgctgaagttcggcgacttcacgctgaagtccggccgcaagagcccgtacttcatcaacgccggcgccttcgacgacggcaagaagatcgccgcgctcggcacgttctacgccgaaaagattagccaggccatcgtgcacaacacgattccccgcaacatcgacaccgtgttcggccccgcctacaagggcattccgctggccgtgtccaccgcgatcgcgctgaacgccggccacaacatgaccgttggatacaccttcgaccgcaaggagaagaaggaccacggcgacggcggctggatggtcggcaccccgctgaccgacggcatgaaggtgctgctcgtggacgacgtgatgaccgccggcaccgccgtgcgcgaagtcatccccaagctcaaggccgaggcgaacgtcgaggtcgtgggtctcgtgctctccgtggaccgcatggagaagaccaaggactccgacctgtccgccgtgaaggccgtggaagccgaattcggcttcccggtgctctccatcgccaacgtgcgcgagatcttcgacgccgccgccaagatgaagaactccgacggcaccccgttgctcagccacgatatccagcagcgcgccgccgcctaccttgaggaatacggcgcctgatcgtcttcaacctaaaaccaaaagcgggcttgcgagcccgctttttttttattacgatccatgaacagcagcaccatattaaggcagaagctttggcaaggagcgtgctatgaactggttagttggtatagggctgtttgcgctcgtggggatatgcagttacttcggcatcgagcatcatctggacagcaaagcgaacaagttgtcgcaaggtaatgaagaagaccgccgagatgctgccgaattacgtgatatcgccgccaaaatcgatcacggtaagtattacccgatgctgtaacgggcaatctgggcctaaattgatgctatctccgtttcgaggggctgatgtcgtggtttccagagatctacttccgtttcgaggggctgatgcccaagtagaagcagcatgaaaatggcggaatgacgttggggtgatgccgctcatactcgggatatgacggatgaacagccccttgaaacggagatagatgtctccagaaggccaaatcagccccttgaaggcgagatagggttttaaactctgggaccgactcgcctgtgatgaaaacccgctcggcgtagaattaccgtaggttcgttacattcgaacaaggaaggccgccatggggaacatcaccgacgatatccggcaacatttcgacaccttcgccgcactgccgttcaccgaggcggacagtctcgccctgtcccagctggcctacgcgcgcatgccggataacgttccgcgctatcacgaggattcggcggacgtcagcggcatgattcccacggtctccatccgcgacctgctacgcgccgaatgctatgacgccatgttcggcaaggtgtggtcgccgcagatgaacgtcgatctgctgcgtgcgatgggggagagcccgcgctggcgcgacctgcgcgtcggcgaatacgtggatgaattcgacgccgaaaccaccaaacagttctcggcctgcgtcttcgaactgggcgacggcacgctgtacgtggctttccgtggcaccgacagttcgatcgtcgggtggaaggaggatttcacgatggccttccgccgtccggtcgcctcgcaggaggccgctgtgcggtatgtgacttatattgccggccgctgggccgggccgattatggtcggcggccattccaaaggcggcaatctggcggtatacgcggcggccaatgtgcccggcgaaattcagggacgtatcacggccgtgtattcgcacgatggtccaggcttcgatgaggcgttcttcgatgaggatgggtacgcgcgcattgcgccgaaaatccataaatcggtaccgggatcgtcgatcatcggcatgctgtttgagactcgtgagcatgtggaagacggctatacggtggtcagcagcgacggtgccagcatcatgcagcattttgccctgcactggcaggtcgatcatggccgattcgtacaggccgatgggctcgccaacagtgcgcagtatctggcacgcacgatcaacggatggatggcaaaatacgacgacgagcatcgccgcaagttcatcgaaaacctgtttgccatcttcgaggctggcggatacgacacattcggcgacctcacttcgcatttgacacagtcactgccgattatgctcgccgcggcccgcaacattgatgtcgaagatcgcgacgtgatgattgaagtgctcaaaggcttcgcc

SEQ ID NO: 2994 - DNA, 6850 bp, Unknown
  R19_24m  MAG No. k141_12080
gtgaacaagctcgtcgagatgggcttcgaagtcctgaccgacgccggctaccagccggagatcgcctacttcgaggtctgccacgagctcaagatgctcgtcgatctgatgaacgagggcggcctgaacaaggctcgttggtcctgctccgacaccgcccagtacggcgactacgtcaacaccgtcatcaacgaggactgccgcaagcgcatggaataccacctgcagcgcatccaggacggctccttcgccaaggagttcatcgacgatcaggatgccggcgccccgcacttcaaggaactgcaggagaagtactccaacgagcgcatcgagaccgtcggcccgaagctgcgcgccatgttctcctggaacaaggatggcgtcaaggatgccgacgaggccaactccttcaccggcaagatcgcccgcgcccaggttcagtgagcccctgtagctcccgctggcgcataagcgcctgaggagagtacccagcacgtaccaaaaggccgccgctccgattcattcggagcggcggcctttcgcatggtcccaccatatagtcaaacctccaccacgtagtaaaatccccacgacgtagcaaactacccaccacgtggtgacgcaaaacggctttattccgcggaatacaaaattacgctgacatcgtggtagaagattcatcgcgtggtgggcagttcatcgcgtggtgggatagacagttgatatacgccggctatcaaatcaatgatgccttgctgtgttccccgtatgccgagctgctttatcggaagcgtttcatgggatattttcccaagaaaatcagcgagatcatggtaggcctcgtcgttgagagacacgcgatcctctggagcaagtagttgagccaaacggaatacatcatatttatgcttcttgagatcttttccgtctacgtgctcgccatgttgttctcgggcgttgagatccaaccatgctttcgccttgaaaggaatgagatatttctcgttaagcacgctgatgccttgtattgattcgcggccttgctgcaatagccgatagtagctgtcgttcagcatgatggctgacaggctggaaacgtcgtttgcaatatgcaatggcgtcaggaacgagttcggcacaatagggaagtcagggtgacgtgaaaatagctcgatcatagtgggatacccgtacgtactggggtgcatgaaacggtacaggtgaggctgtgcggagttcttcgtgatagaggtgtatccgccatcgcgaatgaaagaccacaatcgttgtgcaaactcgcgaagatgtccctcggcaatcagcaccatgtcaatatctttggtggctcggaagtccaggtcgttgtcggtcatgatgatgtcacaagcggtgccgccgatgattacgtaagaatcttcgtagccggcaaaggccgttctgatgagctgcaggccttgtgtcatattgtcactcctgagaaagtattgcggatggattcttgtatggcgtcttccaaacgttcgtcggcaatctcgccaagagtcagggccgtggaaatggggtcggcaaggtagtcttcctgcgtatattgagcaagtaggcggggatcgtacctccacagctccagaatatatgcattatctggcaccttttccaaagcggggtcgataatgcatagttccttgttgtgctgcttgagccaatgacgttcaacggcatagattcgcagttttggggtggccagttgcgtcctgcgcgaaagagcaaattcgccggccggaatcagctcgtcggcaatcatctggcgattgcgattcgtgacggtatatttgctgaatattggtgacttcaggagatgccaagatgatttcagtaaatcaagtcggctggtctgccttgaagtcagtagttcgacgctattgctgcggccttgcttggtgcggtgcacgaatgccagctgttctaacagcgtcacggcaacgctgacctgagcttcggtaaactgaagcgctcgggcaatatctgattggactttgctctcgttggagtagagcaaatacagccagaccagctgtgttgcgggggagaagggtcgcacctcgatatcctgtgcgttctccagcggccgtgaggagatgcgctgggtgaacaccatgcccagtgaagggatatacagttgggtaccgggcacgatgaaaggaacgtgattctgaatcaaggcttttcgctggtatgcagaaagccggggaaactgaaagacaatgggcagatccgtccgctgctcaagcctgctggcgtcggcggtgacgcgtgtgatgctgaatgggtgagcctctccgctcgcgattagcatgctcgtgttgtcgatggtgagtttgctgaatgtccgtccgttggtcagaaatagcggcagtgaggcagtgccatcccaagaagtgatttggcagggcagaccaagtgtctcgcgaatgtaatgctcggcatccatgtcgacctcaatccttaacgaaaatctgtaagattcacatctcttgttaagtatatagaatattattaagtatttcggggttggcatgtcgcgaatggaaagaaagggcagtcatccccgaaatggagacagcttagccgggaaaaaggacgacgccagcatccggagaagatggatgactggcgtcgggtaagctcgcaaaagctctacttgataacccacgcagaagtgtcggtggggagctggccttcgggggtcagcgggccggacgccagcaccactgagccatcgggcagcgcgaccggggcattgccgaagttggtgattgaggtgaacacccgcccgccaaccgccgcgcgggtgtacgccaccacatcgtcgcccatgtccacctgctcggccgtggtgtcgcgcgtggcggtcagcgactcctggcgaatcgccagtgcggtgcgatacagcgcgagcatcgagtccgggtcggcttgctccacgtccaccgcgtaatccttgaaccacagcggttgcggcaggtgcgggtcggcggccggcgtcacgccctcagcgcgcgtagccggcgagaagccgaaggaagcgcccgtgccgaactggccggcggcgcacagcggcacatggttctcgccggtaccgtcatcggccggagtcggacggctgaagtcggccaaggccggctcatcggcggcggtccacggcagcggcacgcggcagccgtcgcggcccttgtccatcgtggcctgagcagtgtggaaagcggtcggatcctccaagtgatcccacggaatatcggccacctcaaacaggcccagctcctcgccctgatagatataggcggcgccgggcaggccgagctccatcaaagcggcggcgcgggcgcggcgagtgccaagctcgcgatcctcgggataggtagtgccgttgcgcagcagccagtcgtgcggcagctggtggtagggcgcgcccttgatctgcggcaggccgtaacgggaggggctgcgcggcacgtcgtgattgttcatgacccacgtggtggtggaaccgccggtttcggccgccgccttgagtccggcggcgatggcctcgcggaactcgtcggcataccagttggcttgcgcgaagtcgaagttgaaggactggcccagctcgtccatcgaagcgtacaggtgctggtgctcgggcaccacccacgcctcggccacggcaaagcgcggcgggttgtactcgttgaacaccttgcgccattcgcggtagatatcgtgcacctcgcgacggtcgaacagcgggtggctgaagtcatgattcagcacgccgaccacgctgtattcgcggccgagctcttccaacggcttggattcgaggtccttggccaggccgtgcgccacgtcgatgcggaagccgtcggtgccgtggtcggaccagaaacgcagggtcttcttgaactcctcgtggatgtccggattcttccagttgacgtccggctgcgccttatcgaacaggtgcagataccactggccgtcggccacgcgcgcccaggccgggccgccgaagaaggattgccagtcgttcgggggcagttcgccatgctcgccgcggccgtcgcggaagatgtagcggtcgcgcgccggggagccaggctcggcggcgagggcctcctggaagaacacgtgcttgtcagcggtgtggttgggcacgatgtccacgatcaccttgatgccggcctcgtgcgcggccttggccatcgcgtcgaagtcttccatggtgcctaggcgcgggtcgacgttgcggtagtcgattacgtcgtagccgccgtccgctaggtcggaggggtagaacggggaaagccagatggcgtccacgccgaggctcttcaggtagtccatcttctcggtgacgccggcgatgtcgccgatgccgtcgccgttaacgtccttgaagctgcgcgggtaaatctggtaaacgacggcctgcttccaccagtcgtcattgaggttatttgcggtcatgccgattccctcctgttccgggtgcgttgtggttgggttgttccggtcgcgcccgaactgctgtgtgaaggcccgaccgttgtattgatgatgacaacgatatcatgtgaattacgcatgcaaaaatcgatttatcggcgttttgcggtggtaacgtgctcacgcctgcgcgggcgctgctgtcgcggcaggcggcgcggtggtttcgcgcagtattagcggagtgtccggccgtacgaatgccggttcgattgacttgccggcaatggcatccaataccatgtgcccggcagtcgcgcccattgcgaacgggtcctgatgcagcgtggtcagtcccacggcggcggacagggtggaatcgtcgaagccgatgatggaaatgtcctgaggtacccgccgcccgtattgacgcaggcgatacagcacgggcgcggccatttcatcatcctcaaaacagaaggcggtgatgctgggggaggcgttcagtacggcgttcaatgccgcgttgctttcgccaagaccgcgttgaatgctcaggggcgttagctcgatccccggatgggcggcagcggcatcaatgacgccctgcaaacgagcctcggcactgtagcgcatattggtttcggtcggtgcgctgccgacgaacgcgatatgccggtggccgagtgcaatcaggtgctcgatagccgaacgtgtggcggcgtaatcatcaatgctcacgcctgcgtcgaacccatcggtggaggggatgttgatgccgacaatcggcacgtgcatatgcttcagtcgctccacctcagccggttcgatgtcgaaggagctgacaatcaccgcatccgcattgcgccgcacgggcaaatccgcaaagaagtcgtggcgctcggcggcgttgcgcatggggtagggcacagtgtcgtagccggaggggcgcagcgccgagtcaagaccggcgaagatgttcgaattgaaccaactggcgatggtctcgctggcaagtagtgcgatacggaacgattggccggattttagggcggcggccgagcgtgagactgagtagtcgagcttttcggccgcggccatcactcggtctcgagtctcgggaagcaccagatccggcttggcgaaggtccgggacaccgtggatacggaaacgccggcctcgcgggccactgcctgaatgcttgccttggtcatatgccgtcgctccttcgccgtcgcgaacaatcattgtcatgacaacgataacatgcccataacaagtcgtcgtcttcggctatctcgattacgaggggctgatttagggtgtcccggacatctacttccgtttcaaggggctccttgccggtgaagccacaagtgcaaacgactttgtgccaacgtcattccgccgttctcgcgttgggtctacttgggcaccagccccttgaaacggaagtagatgtccgggaaaggccaaatcagcccctcgaggccgatttagaccaatttcccattgcggaatcgatcaccgcttctctcggcgcatcacggcggctagggactgcacgcgtggcaggtcgaagacctcgtcggtatgcaccacgtggcctgagctgtccgccagcggcacgcgccagttcgaatactcgctggaagtgcccggctgattctgggaacggcattcgcccacgccgtccaccagcgctgcctgcagcagcagcgacggcgtatcggtgagcatggcgtgcatcgcttccacgatctcctgcacatggccttccacatcatccgccacggtttgtgagatatagccgttctccaccagacggttcatcatggccgtgcgttcggccatcgccgaggcggcgaacgcctccaccggctcgctcaggagatgcagctcctcgcgcagcttgacgtgttcgaagttcaggtagccggcggtgggtggcagatcgtgcgtggtcaccgaggccaatgcctgcttgcggtagtcctcgggtgcgcggtacgggtcgccggcgttcggcgaatcgtccacgcggttgaaccattccacgtcagtgccgagtacgccgtgatcggccagaatgcggcgcacgtaatccggcacggttcccagatcctcgccaaccaccatgcctccggcgcgcgtggcttcgatggccagtactcccagcatcgcttcgtggttgtacgttacgtatgcgccgttgagggcgccgagcccctgcggaatccaccacaggcggaacaggcccagcacatggtcgatgcgcaccgcgcccgcgtgctcgtacatcgaatgcaccatctcgcggtacacctggtagccggtggcctccagatagcgtgggctgaa

SEQ ID NO: 2995 - DNA, 2677 bp, Unknown
  R19_24m  MAG No. k141_12110
gcgcggcagcttctcggcgatggagagggcctcgtccagatcctgatgggcgatctcgtcgatgcgggcgtacagttcgtcggtgtactccgggaagagctggaattccttggtctccttggcggcgatcttcttgagctcgtcctgagcctcgcaaatcaccttgatgaacggcttggcggcctcaagaccaccggccacgacctcctcatcgggcttggtctgaccctcgtcatagatgaggtgccaggcgttcttgccggcaccggcctcgatcatggcgatggcgacgtcaccgttctcgaccacacggccggcgaccacgatctcgaatacggcgcgctcacgctcgctccaacgcgggaaggcgacccactggccgtcgatcagcgccagacgcacaccggagaccgggccttcgaacggcaggccggagatcatggtggaggcggaagcggcgttcagggcgatgacgtcgtatgcgtcatcagggttcacggcgagcacggtctcgacgacctgcacttcgttgcgcagggtgtgcgggaacagcgggcgcagcgggcggtcgatgatgcggcaggcgaggatggcctcggagctcgggcggccttcacggcggaagaacgagcccggaatcttgccggcggcgtacatcttctcttcaacatcgacggtcagcgggaagaagtcgtagttctccttcgggctggaaccggcggtggtggtggacagaatcatggaatcgtcgtcgaggtaggcggccacagcgccatcggcctgctgggcgaggcggccggtctcgaagcgcagcgtgcgcttgccaaacgatccattgtcgattacggcctcaacggccttgatttcgggaccctccatagggttcctccttctttaattttctaattattcctacatactgtgctgcggtttggcgactcgcttgaaccgcaactgtcctcttcagcggacgtcacataccttgtttcgactggccccttggccgccgttcctcgtgtcaaccccttcattcgggttctcttgtcggccttacctgctggcctatcctctaaccctcttgccgttgttgccgttggctggcgatatgtaaaacgcccgagcaccatcctaggtactcgggcggaagtcttcaattatcgacgcagacccagacgctcgatgagggaacggtaacggttgatgtcaacgcgcttgaggtagtcaagcaggcgacgacggtcaccgatcatcagttgcataccacgacgggagtggtggtcgtgcttgtgctccttgagatgctcggtcaggtcggcgatacgcttggacagcagagccacctggacctcgggggaaccggtgtcaccttcgtgcgtcgcgtactcgttgataatctgggtcttctcgtcagccgtcagtgccacggcgtcctccttattgtgtcgttgcgcggtgtttcgtgcaggttcgctcgaaacgctctctatccgcgggcgaaattacgccaaatgaaaactatacggcaggggccggactggggcacacgcgctcacacagtggtgagcaatccgccaaacaacaccacgagcagggcgatggtttcaatcacgaagtacagaatgaaactcgcccagcttttggtcagcacgttcagcggcgaggtcttccggataatcaccagcagaccaacaaacaccaaggcatatacggcgatgccgatcgccgcacccataatgcccaggttcgcggcattcgccaggccggcctgcttgccgtagaccacgtacgtggaataccagaaattgagattgagcatgctgagtcccgcgatgaactgctcgccggccaacccgatcacgaacacgatcagccacggccaggacggcgagacgaccaccgccatcgccaatccgacgtacgcaatcaccacggtcacccaaccgaccagcgcgatgccttgcggagacactcccccgagcacggtcacaatggagtcagtattatttaccgccaacgaacggccgaaccagtacggcgcgatgatggcgcacagtacggcaagaataatcagcgcccaacgcaacggatgcgaacgacggcgctcgatatccgccagagacaaatcggtctcgggtatggaagcctcggggtgcttggaaacctcgacggtctctactttgccgcctacgatttccgtcgcctcgttaggttcttgctcgttggattcctgctccatgcaccgcctcgccgattacctgctcattgccgattattgcgatgcccatcttagcgtgcgtgttgggcaagtctccgatacgatcgattactcgccctggtcctcaccatgatcctcgctacgattctccttatccgaatccgtgggagcaacgtcattattgcccgcagacaagccgctgttggctaattcgtgctactgccctatatcctgattttcggtgttttcagggtatagaaaaatccccgtagagcatactatgctctgcttttgatgattatcgaaacatagaacatgctttggctcaatcgtcatatgcccgaagtggcaacaattacaagttatcccgcaccatcgcaacgacatcatgattgattttgttgatgccggggtcggcaagcatctcatcaagagtcatccagcggcagtccttggcaccaa

SEQ ID NO: 2996 - DNA, 2812 bp, Unknown
  R19_24m  MAG No. k141_12146
ggcgaacacaccggcggcgaacagcagggagtcgcccggcaggaatgggaagaacaccacacccgtttcgataaatacgatgaggaagatgaagccgagggtcggcgccacgcccatggcaatccaaccggcaatcgcggcacgcggatccttcagcagttcgaggatgaaattaacgaagcccatgtgtttcctatgagtcctatacgtctatatgtgtgaacaatctgtccaataaccagacatttgtctgaaaaccgtcaaccaccctaccagtcgccccgatacaagagggaccaccggaacctcatagcagccattactgccatcttcttcacaaatatggcgtgcttcgctggtatcgtccatgcatttcaccgcgcacgatgagcatcatatgcgcggtgatgcaatcagtcactcgccaagacgctggcgcacgaaaccgtccagcgcggccgcatcgataccgtcatacgattcgatggacgcgaactggcccaggccggaagtatccgtgcgaatccagccggtctgcgcgatcagagtcgcgcccgatgccgcaccggcctgaagtccaaccgaggaatcctcgagcaccacgcacttggccatgtcttcacgggcgatgccaagcttgtcggctgcggccagatagggcgcagggttcggcttgtgttcgtacggatcgtcgccacagacgtagccggcgaacagtccctcggactgcttcatgatgttctccgccatacggcgcggcgacgtggtgaccagcatggacggaatgccggcctccttgagcgagtgcagcacgtccaatacgccgggaatccacggcagacgttcgacctccgccttgaacacataatccttgagctgtttgtcgatttcgggaacgctcaatgtgcagccatgcgcaatcatgacctctgccacgtgtggcaccggagtgccggagcactcccaaccgaggtcctcgttccactcgccgccattgttgtgcgcgatctcgatttcaccgtcatgccaaagcggctccgaatcgataagcgttccgtccaaatcccaaaacacggccttgagcagcatggttacctccgtacgtcgcagtgaatcctcaactattcgtattcgatatacctatctcaccaactccgcacgacagccgaacagcaaatcaccaaccccacaggaccatggatttggaatcggcgggggtggagtcggattcgcgcgtggtgtcggcagcggtatcgcggccgggcagttcgcgggtttcgcggcggatggcgttgcgccagaggcgggcgcggttggagcgttgtacctccacgatattgccgtcacggcctgcggcgaaaacgctctcctggtcgccggtttgcatgcgtttgacttcgcggcgcagttggcgattctcttcttcgagggccaaaatgcgtgcgatgccggaaagattgataccctcatcctgacttaggcgctgagctcgagtcaggcgggcgatgtcgcgcaggcagtagcggcgtgcgccgccatcggtgcgctgcggacggaccagacccagccggtcgtactggcggagggtctgggggtggatgttgcccagttcggctgcctggccgacggtgaagatgggcagttcgatgtcgaagccgacgtcatcggctccgtcgagatcggccctgcccatcaccagcgcggttgcgcacatcgcgtacaactgcttcatttggttggctaaccgcgccattgttcacctcctgattacaggctgagatagtcgccggctttttcgtcgaattctttggcggcgtgcttgacggccagccccggcttggcggggaccatgatctgcacgcggccgatcaggtcgcccggctggttgccgcgctggacgccaagtcccgcgagcttgacctcggcaccggagctggagcctgccggcaccttgaaggtgacgggattgccgtcgatatccttggcctcgaccttgccaccggccacggcctggcccacagttacgggcaggtccatgacgatgtcgtggccgcgcatcgagaacgcggcatcgggcttgacggtgacgtgcaggtacaaatcgccggccttgccgccgttgatgcccggcttgcccttgccggcaagcttgattttctggccgtccttgacgcccgcaggcacgtgggccttgaacttcttgccgtccacggacagggacacggtagcgcccttgaccgcctgacgcagggtcaggctgatcttggagttgcggtcctcgccgttttcggggcgcggggcctcctcatagccatagccgccggcattgccgtacggcgattggccgtagccgccatacgactggccgccctgacctgcagcaccgccgaacatcgagaagatgtcgttgatgttgttggggccgccacctgaggtggagaagcggatacgcgaaccgttgccaccggcaccctggccaaacatggagccgaagatatcagagaaaccggaagcgtcgaagccacccgcgccggaaccgcctgcgaagcgggcgccgcccatgccgaactggcgaatcgcgtcgtacttttggcgatcttccttcttgctcagcacgtcgtaggcttcggagatgtccttgaacttctcctcggcttccttggtcttgttgacgtcagggtggtacttgcgggcgagcttgcggtacgcttttttgatgtcgtcgtccgaagcgtccttggagacaccaaggactttgtagaagtctttactgagccattcgttttcagccattcatgtctcctttcttgaa

SEQ ID NO: 2997 - DNA, 5215 bp, Unknown
  R19_24m  MAG No. k141_12152
gaggctctgaagcctggtcaggacgccatgcacctgctgcacctcgaccagcctctgcttgagatcaacatcaccccggaccgtggctacacgctgtcctaccgtggcgtggcccgcgaataccaccactccaccggtgccgtctacaccgatccggccgtggcactgaacgagaaggccccggaacctgctgactaccagcccggcaccccggtggacatcgatgttgaaatcgacgataacaatccgattcacggcgtgcccggttgcgaccgctactacgcgcgcatcgtcaaggacttcaaccccaacgcccacacgcccaactggatgcgtcgtcgcctgatccgcgccggcatgcgctccatctccttggccgtggacgtgaccaactacgtgatgcttgacctcggccagccgatgcacgcctacgacctcgacaagctcgaaggcccgattgtcgtgcgccgcgccaacgagggtgagaaactcaccaccctggacggcaaggaacatgacctgagcgtcgaagatctgcttatcaccgattcgccgaacggcgaacgcggctcgcgcatcctcggccttgccggtgtgatgggcggcctgtatggcgaagtgaccgctgacaccaagaacattcttctggaggcagcgcacttcgatcaggtgaccatcgcccgttcggcccgtcgccacaagattccatccgaggcctcccgccgcttcgaacgcggcgtcgacaccgcgctgcagcccgccgccacccagatggccgccgagctcatggccaagtacggcaacggcgagcccagcgaacacccgaacgacgtgaacaacacgccgcgcgccaaggtcatccacttcaaggcctccgaagtggcccgcgtggccggcctcgacgtggacatcaaccgcatctccgacatcctgaccgacattggctgcacggtggccggcggcggcaacggcgagttcgccgtaaccgcgccgagctggcgcccggacttgaacgagccgtgcgacctggtcgaggaaatcgcccgactggtcggctacgaccagattccgatcaccgtgccgccggcaccggtcgagggtctggtgggcctgaccccggaccagcagcgtcgccgtcgcgtggcggacgagctcgccgagttcggcatggtcgaatcgctgagctacccgttcgtgggcgacgacgattacaaggccttcggcttcgacccggaagccaccaagaaggtcagcgtcgagatcgccaacccgctctacggcgaccgtccgtacctgcgtcgcgagattctgccgaccctggccaccaccgtgcagcgcaacatccgccgcggcatcgaaaacgtgtccctgtatgagctcggccacgtctacctgtgggatccgaacgcgcccgccatcccggcactgcccggcggcgtgcgccccaccgacgaacagctcgccgcgcttgacgccggtctgcccgaacagcccgaccatgtggctggcatcctgaccggtctggccgaggacgatggctggatgggcggcaagcgcccggtcgactggtccgacgccgtcgaggccgtgcgccgcatcgccggccgtatcggtgccgcaatcgaactcgaccagcccgccgccgacgatgtgcccgtccaatggcaccccggccgcgtcgcccgcgtcatggtgggcgacgtcttcaccggctgggttggtgaactgcacccgcgcgtcaacgaggcgctcggcttcccggcccattccgcggcctttgagctgaacctcaccgcgctgttcgccacgctgaccggcaagcccgtccaggccaagccgatctccacgttcccgccggtcaagcaggatttggccttcaccgtggacgagaccgtgaccgcaggccagcttgagaacgtgattcgcaaggccgccggcgcgaacctcgaatccatcgaactgttcgacgtgttcaccggcgaacaggtgggcgagggcaagaagtccctggcctatgcggtggtgttccgttcaccgagcaagacgctgtccgccgaagacagcgacgccatccgcaaggccatcgtggctgaggccgccgaaatcggcgcccagctgcgcgcctgacccaaccgatcatccgaatcgaggagcgtcatgagccaaccggagcaggacaagccgaaatacgggcagtaccagcagcctgaatatggtgctatgtctggccaatacggaccgaattacaacccgtatatttatggcgctcccgagccggataccaagaaggattccgccgcagccgctggcatcaacggtggcgcggcgcaatcccagcaggccggccagccgtacggccagcagccggcgtggcccggcaatcagcaggcgggcggctggccgtatgctcaaggcggccaacagtccggtccgggcgcatatccgggcgggtacccgggcatgcaggggcagtcgtatggtcaacagccgaacggtcagcctcaccagccgcattattaccacggcatcgacctgaacgatccaaaccagaacccactctacgggcactgggattcgtatgcgatcatctcctttatcctcgccctgttcttcccggtgccagtgctctcggcactgatgggcgcggtggcaatgtggcgcacgcgcaccttccatatgaaaggcttcggtttggctgtggccgccgtggtgatcaacgtgctgtacaccatcgccgtcatctggatggccttcaatggctatgacgccatgagcctctaccaggaagccctccagcaactcaccggcggcaccggctcctcctccgactccatctccgcataagtggcgttcacataccaacacacccactgcataaatatgcaatagtctgcataatcgcgtatactcatcccaagacacatcagtgaaaagagatgagtatggcgaaatatacagtggccgtggccggtgccacgggctatgccggcggtgaagcgctgcgcattctggccgcgcaccccgacttcgacatcacctgcgtggcaggccattcctcagtgggggagtcgatggccaagcacatgccgcatattccccaactggccaatctgtccgttgaagataccacgcccgaagtgctgaacgggcatgacgttatcatcctcgcactgccgcacggtgcttcgggcaagctcgcctcgcagctcgatccgaatgccgtggttgtggatttgggcgccgaccatcgtctcgaagagcaggccgcttgggatgagttctacggcggcgatttctatgagcattggacctacggcatgcccgagctcatcaccggcaaagccgcggacggctcctacacccgccagcgtgcggcgcttcctggcgccaagcgcatcgcaggtcctggctgcaacgtcaccgccaccacgctggccctccagcccggcatcgccgaaggactggttgaatcgcaggatatcgtggccgatctggtcgtcggatactcgggtgccggcaagaatctcaagcgcaccaacctgcttgccgccgaggccctgcaatccgccctgccgtattcggtgggcggcaagcaccgccacattcccgaaattctgcagaacttcgcccacgcggccggcaagagcgcggccgaagccagcgaattcacgctcggcttcacgccgattctcgcccccatgtcccgaggcatcctcgccaccgtgtccgcccgcatgacggacaaggccaaggcactgagcgatgaggagattcgcgccgtatggtccaaggcctatgaaggccaggacttcatggtgctgctgcccgagggcacactgcccgccaccggcaacatcatcggatccaacgcagcccacctgcaggtcgtcgccgaccgcaaggccggccgcatctacgcttttgccgccatagacaacctcaaccgtggcaccgccggacaagcggtccaatcactgaacatcgcactcggcctgccggaagacgcgggcctgaccaagatcggagtagcaccgtgagcgttacatttgcacaaggtttctccgccgccggcgtggcggctggtatttcatccgtcgaaggcaagaaggacttggccctcgtggtcaacaacggcccgctcgacgcggctgcaggcgtgttcacctcgaaccgtttttgtgccgccccggtgcagtggagccgtaaggtcgtcgccgacggtcacgtcaaggccgtgattctgaattccggcggtgccaacgcctgcaccggcgaggccggttacgcccagtccgtcaccaccgcggaaacggtcgccggtctcatcggcgccgaaccgaatgatgtggctgtctgctccaccggtctcatcggtgaactgctgccgttggacaacgtgctggctggtgccaagagcgcccatgaggctcttgccgccaccgccgaagccggcgccgacgcctcccacgccatcatgaccaccgacaccaagccgaagacggtcgaattgaccggctccaacggctggaagatcggcggcatggtcaagggctcgggcatgattgccccgcagctggccaccatgctgtgcgtcatcaccaccgatgcggtcgtctccgccggccagatgcaggccgcactcgccgtggccgccgaacattcgttcaaccgcatcgacgtggacggctgcatgtccaccaacgacacggtcctgctgctcgcctccggtgcctccggcgtcgaaccggacaaggacgaattcaacaagctggtgcgtgaggcctgcgtctccctgtcccgccagatcatcggcgacggcgaaggtgcctcccacgacattcgcatcaccgtcaccggtgccaccagcgaagacgcggcacttgcctgtggtcgtgccgtcgccgcctcgaacctgctcaagtgcgccatctccggcaacgatccgaactggggccgcatcgtcagctccttgggcactgtgccgcctgaagtcgcgccttacgattcgaacagggtgaccgtggacgtcaacggcgtgcgcatctgcgagaacggcggcgccggccgcgaccgcagcgaggtcgacatgaccccgcgcgaagtccacatcgacatcgacctgaacaccggctcggacgccgaggccaccgtctggaccgacgacctcacccacgaatacgtccacatcaacgccgactacgaaagctgacaaaca

SEQ ID NO: 2998 - DNA, 10436 bp, Unknown
  R19_24m  MAG No. k141_12368
ctggccggggtggtcacggcatcattggtgatgagattgttggttgaggcgcgctcggtgtcaagacaactcaccaggaatttcgatacgagcctcgaccggttgggcagaatatccggtgcgcccacaatgcctacgctggagccgatgggaataccttcaagttcgttgtcgtctacggtgataactcggtattcgtctgaggggatgagcagacgtgcgctggtggtgttgattaccggatgcagcacaccgttgacgctgatgaatcgagatgcggtgtctttgcccacaatgagtttgttattgctccagtctgaaggcaggccagggctgatgatgccatagaacacactgatcagaaccatgatggcggtcaggccgatactgaccatcaccggcgtcaggcctttcttaggagtcagctccttgccatccggcataccggaagtgaaggcagtaatgagcctggcccgcgaatagttttgtgcgtcctgcaggtccttcttattcgccatggcccctcctcacaatcccaatgccacgtaggcgagcggcagggtggccaccacacagattacgttcgaggcgtcagccagacgggtcatggcgatggaatcgtgcttggacagctgtgtgccgatgacgcacagcaacgctcccagtgagaacaagcccaccaccaccgaagcccacgtggggtgaaacaccgtgcatgcggcacaagacaggcagatgccggcacctgcggtgataacggtgatcagcatttccgattgtgcatagatgcgcctggaatcaagcagcatggctgcgaacagaaccaaggtaagtgccacgcctgctgggcttgcactggaaacagccagaggcgtgccgaacacgatcagtgcgctggtggcagcgcgcaggtcgaacagcagcgtggagccgatacggtacttattacgcacttcgctgatatcgatgttcttgggcagcgcgaaaatttccgattcgctggtggggctgtccacagacaatcgtgcggaagacaggctgagccacggcagcgcattggcagccagaccgagcagagccactgccacgatccatacgcgagtggaccagtgcggcatcgttacacacacaatgccgagaatcaccagtgctgcgccgataatgacaggaatcaacgcgtacagtctgttcactgtaagcagcaaacatgaaatgccgccggccagcagtaaaccagcaccgataccaacggccgggaacccgtagaacgagggattgaacagtgaacccatgagatgatatccggtcacgccggccaaaagcgaggcgactagcgacagtgccagtgcctgccgatgcatatggcgcgaagccagtaccgtggcaatcgccagtaaagcggctgcggtaatgcccgctacgccagcattgatgatggatagtggggccaatgccagacaaatcgctccgacacccagtagcacacaactgaccaccattgtggtcactgtggtattggcactggtccacggtcgatgagaacgctccaccgaatcggccaccgcctcaaccacatcgtcgtagacgatatcctgatcgcccaaggcgttgacctcgagtttgagacgttcaccgtctcggatggcctgatcggccagcgaagcgggattattgatggcggtttcgtcgtcacgggtcagtcggtagccggcatacaccagagtcggatcgaacacacctagtttcttggcgatatcaggcagcagttcagctaccggaagtgtcgacggaacattgagtttcgcggagcgtttgccatacaccacagtgatggccacgcgcggggatgatgcggaaggcgagggctgattggctggcactcccatcgcaatcgaaggtacgggcgttggcgccggaacgtgtggtgctatgcgcggcggtgccggcatcatggacggtccggcgggcgtgtggcgatgcgacgatgccatagggtgcttcctcttctcaataaactcccaaaggtctactgtattcttgtattctctcacacattgcgggtatcgggaatgccattgtctggtcctagagcagattccgtggcgttttttgccgagtcgggtcctagggtggagcacaacgactacgatggtgcgggtaacgcgatacaaggagtggaacttcatatgccgaagatgtttggaaccgatggtgttcgaggactggccaatagggatttgaccgcacgtctggcgttggatttgggcgatgccgccgtgcgtgtgctcggcgacgccggcacccaagacgatcagcctgagggacgccgccgcgcgctcgtgggacgtgacacccgtgtgtccggtgattttctggcttccgccctgtccgcgggcatggccgccggcggcttcgacgtgatcgatgccggcatcatccccactcctggcgtggcctacctgacctccgtgctcaacgtcgaaatgggtgccgtgatctccgcctcccacaacccgatgcccgacaacggcatcaagttcttcgcacgcggcggcttcaagctgcccgaccagaaggaagacgacatcgaggccgtgctcggccaggactgggaccgcccgaccggtgccggcgtgggccgcgtgagccacgaccagaccaccgccaccaacctgtacatcgatcatctggtggccaccatcgctccgctgaacgatgacaaaacccagcccaagccgctcaagggcctgaagatcgtggccgactgcgccaacggcgccacttccgtggtggctcccgaagccctgcgccgtgccggtgcggatgtaatcgtgatcaacgcctcgccggacggctacaacatcaacaagaacgccggttccacccaccccgagcagctgcaggccatggtcaaggccaccgatgccgtgatgggcgtggccttcgacggcgacgccgaccgttgcctcgccgtggacgaagacggcaacatgatcaacggcgaccagatcatgggcattctggcccgtgccaagcagcgcgaaggcaagctcaaccacgacaccctcgtggtcaccgtgatgagcaacctcggtctgaagctcgccctgaaagacatgggcatcaagaccgtggaaaccgccgtgggcgatcgttacgtgcttgaggaaatgctcaagggcgattactcgcttggcggcgagcagtccggccacgtgatcaaccgcgaattcgccaccaccggcgacggcaccctgaccgcactgaccctgtgcaacgaggtcgtcaagtccggcaagagcctgaaggagctcgccgccgacttcccgcagctgccgcagaccctcatcaacgtgccgaacgtggacaagaaagccgccgccaccaacaagcgcatccaggatgccgtggcccgcgaggaggaactgctgggagacaccggccgtgtgctgctgcgcccctccggcaccgaaccgctcgtacgcgtgatggccgaagccgccacccaggcctacgccgacgaagtctgcacccgcctcgccaagatcgtcgccgaagaactcgcgctgtagcacccttccctaaggaaaagcaatgtttggaaagaacgccaaagtcgacctcgaactcaaccgtgatgtcgaacaactcatcaaaaccggcggcaaggagaagctcctgcccatcgtgcaggccggcgaaccggtgttgcgccaacggacggtggcctaccatggccagctttccaagcgtacgctcgccaaactcatcgatacgatgcacaccaccatgctggaggcgcccggcgtggggctcgccgccacccagatcggcttggggctcgcgctcgccgtggtcgaagaccacgtgcgcgacgacgaggatgatccgcgcgaaatcgcggaattccccttccacgtgatcatcaatccgcgctacaaacccaccagcgacaaaaccgcctcgttctacgaaggctgcctgagcttcgacggataccaggccgtgcgcaagcgttggctcgacatcaccgccgaatgggatgatgaagacggcaagcaccacagcgagccgttgcacggctggcccgcacgcatcttccagcacgagaccgatcatttgagcggcgaactgtatatcgatcgcgccgaaatccgttcgctgaccaccaccgaaaacctcgaggattattggtgcgacgacccggtacccaccgaggccgccgaagaactcggcttcgcactatgatcgaccgcacatggctggacgccgccaagggagacattccccaatgggcggcgtccatgcccaaagacgccgacggcaccaccattgactgggactgggtgcgttcgctggacctgatgcatggcatcagcgtattgctggcgcttgctgcagatggtgagcaatatggcgaaaccgcagcacagcctcagctcgggttggaccaaccggaactgacgccacaagctatccacgacgcattgaagatcgattacgccacacgcgagcatctggaatcaatcatcgcccaatgcaacagcacattcatgaccgattacgatcgattcatcggctcctatcgtctgcctcgcgcgctcgcctacgccaatcgtcggctcaacgacaacatcaacacgctgttgcatctgggcgaacagcaacacctatgggtggtcagtcgcgaacggcgggggaggactaccgttgccgtgctcaggccgtactccggcagccgcccatcgaacgatgaccaaggcatgctgaatctgagcggtgaaaccggtgacgcatctgccggaaacactgctgccgaaaacagcgatgtcaagttccccacaacagtcgccttggacgatatccaagaccgtacggcggcgattcttgacgcacgcgccgaacgacgtaaggcccagcgcttccagaagcgtgcgggcgatgcggcgatggcccgcgccaatctctccggcgcgacttcgccgggtggtgccgcctcgtctggcaacgctaccggccaccatcccaagcccgactggcgcgacgcctatctgcccggccgcgacgtggacgcggtgatgggcatcgacatcgaaaccaccggcatcgatccggcgcgtgactacatcatcgacgtcggcttcgagttcatgaacatggccagtccgcgcccggccggcgaacctgagacatacgcctatgagcagggctattacgccgccggcgacgcctacggccagtcccgtctcgcttttggcgtgccgccggaaaacgcggcgctcggcaacgccctcatcgccaaactcaccggcatcgatgtacgcggccgcagcagcgaggccgggtaccgactcttcgacgaatggccccaagcccaggccggcctgctcgcgcggcttacccagcagccgtacgtggcgcataacgccaccttcgaacatagctggttcatgctgaacgtcgccggatatgcggaaagctaccgtgccgggcgcatcaccatcatcgataccctgccgatgagccggcagtgggaccccggcgcggtgcccaccaacgagcatccttacggagacaacacgctcgacgcctacgccaaacgtcagggcgcgcttgattccgcccacaacgaacgccacttgggccttgaggattcgcacatcatgctggtggccatgaaacaccatctggcggcgctgaaagcgcaaaggaaagggccgtgggggcccgccggcagggctggcgtcggcggcaagtcctgcggtcgtaagcggtgagtacactattggtctcgtgagtaactatcaggacggccgacagcagcgtgagaaccgccgccgcaccgtcgtgcgtgtggtgtgtgtcgtcatagctgtggccatgctcggctccctgatcatcccggcgatttacgcggggctttgacgttgccttcgcatattcgtgcccgcagttgaacacgtctgatgcgagggatttgtgaggtcgcccggccggctatcggcaaggcaggcccggaaccttctggcagcatggattgcaggcggatgcgtgtgtggcgcggcaatgcccgccaacgccagaggaatgtgcgaaggctgtcaacaaggacgtgacttcccaaagaatctcaaagaatcaacagtaaggtaaaccacgatggcagaatttgactttacccaggcgatcggcgaagcccgcgccaaatacgaatccatcgccaaggcgctggacgtcgaccggctcaaggccgatatcaaggatctcgaaacgcaggccgcggccccgggcctgtgggatgatccggaaaacgcccagaagatcaccagccggctgtccgccgcggaatcgcagctgaagcgtctgaactccgcctcccagcgcatcgacgatgtggaaacgctcgttgaactcggccacgaggagggtgaccaggactctctggacgaggcgcaaagcgaaatcggcgagattcagaaggatctcgaccagatggagatccagaccctgctcgatggcgaatacgacgaacgttccgccgtggtgaccatccgctccggtgccggcggcgtcgacgcggccgacttcgcgcagatgctgttgcgcatgtacctgcgctactgcgagcgtaacggcttcaaggccaaggtcatggacacctcctacgccgaagaggcgggcatcaagtccgccaccttccaggtggacgccccctacgcttacggccgtctgtccgtggagggcggcacccaccgtctggtacgtatctccccgttcgacaaccagggccgccgccagaccagcttcgccgccgtggaagtggtgccgctggtcgaggccaccgaccatatcgacattccggatacggacatccgcgtggacacctactgttcctccggccccggcggccagggcgtgaacaccacgtactcggccgtgcgcatcacccaccttcccaccggcatcgtggtgaccatgcaggatgagcgttcgcagattcagaaccgtgcctccgccatggccgtgcttcagtcccgactgctcgtgctgcgccacgaggaggaggccaagaagaagaaggagctcgccggcgacatcaaggccagctggggcgatcagatgcgctcctacgtgctgcacccctaccagatggtcaaggacctgcgcaccggctacgaaaccagccagactcaggccgtgttcgacggcgacatcaacgcgttcatcgaggccggcatccgctggcgccatgaacagcgccgcgccaccgaaaccgaggagtaaacagcattatggcactgatctcactggacaatgtgtccaagatctatcccaaaggcacccgaccggcgcttgacgacatcaacctcgatatcgaacgcggtgatttcgtgttccttgtgggtgcgtccggttccggcaagaccacgctcttgagcctgctgttgcgcgaggaggaggccaccagcggcgagattcgcgtggccggcaacgatctgcggcgcatcaccaaccgtcaagtgccgcagtaccgccgttcgctgggcttcgtgttccaggattacaagctgcttaataacaaaaccgtatgggagaacgtggcgttcgcccttgaggtgatcggcacgcggcggtccaccatcaaatcgttggtgcccaaggtgctgaataccgtgggactcaccggcaaggaaaagaactatccgcatgagctctccggtggcgagcagcagcgtgtggccatcgcccgcgcctacgtgaatcacccgcagattctgctggccgacgagcccaccggcaacctcgacccgaccacttcgctgggcatcatggaagtgctggacgccatcaaccgcaccggcaccaccatcgtcatggccacgcataacgaagagatcgtcaactcgatgcgcaagcgcgtggtcgaactgcacaacggcaagatcgtgcgtgacgaggctcatggctcctacgattccgccctgttcttcccggatgccgaagtcgaagccaagtccgacaccgcccatcatgtgctggcggcggcgaccaaggccatcgagggcagtgacgagccgtctgaaggcatcgcccgtttggccaattccgtgcattccggccgcaccggccgctatggcgagacgtttgcgccgctggaagacacgctgacctggggcaagggcatttcgttggatgagcaggccgccgccctggaaagcacccaggcgttcgacccgttcaaggacgagtccgccgcgaccgccgcggttgccgatacgtccgtgtcatccgccgccgagccgccggccccgccggagccgcccgcaccgccggaaccgcccgcaccgccggccaacgagcagtccgccgccgagcagcctgctgacgagcagtccgccgcagaccaaacatccgacgatcaacccgctgagggcgcgaaggagtaagggggatcatcatgcgagcacgattcattctgtccgaaacgtgggccaacctcacccgtaacctgtcgatgctgctgtcgctgacgctggtcaccttcatctcattcctgttcatcggcgcttcggtgcttactcaggcgcagatcaccaaagccaagggcgactggtacgacaaggtcgaggtcgtggtgtggctatgtcccgacggcaccagccagtccgcgaactgtgcttccggcaaatcgccctcagccaatgagatcacggcactgcagaaaaccattcgcgatgaactcaacgacgtggtctccaacatcgactacgtcagcaagcaggatttctacgacaacaccttcaccaagcagtacccgaacggtgaattccaaggccgtacgctgaccgcggacgatatgcaggactccctctggctcaagctcaaggaccccaccaaatatcaggtggtctccgaagtgctctctggcaaggagggtgtggaagacgttaccgatcagcgccagatcttcgacccggtgttcgccgtgctcaaccgagccacggcggttacggccgtgctcgccggcgtgatggtggtggtcgccatcctgctgaccggaaccaccattcgtatgtccgccgcatccagacgaaccgaaaccgaaatcatgaggtacgtgggtgcctcgaactggacgattcgtctgccgttcattctggagggcaccatcgcctcgctgatcggctcggtgctctcgtgcctgatgctttcggccatcgtcaacgtgttcgtcaccggctggctggcgaaatccgttacctggattccttatgtgaatcagctcacggtactggtgatatcgccgttcctggttgtgggcgcgatactgctgtccgtcatcgcttcaaccatctcgttgcggcgttatttgagggcgtaacgcgaccggcttacccgcgagaaatgtgatgacatcgtgtgcaagcctctcaggttcgcatgttatggtattggcttaagtgagcgaaaggactattcacatatgacgaacgtacgtgtgatcaagcccgcactggcggcactggtggccgccgcagcctgtgtgggaggtctggcgttcagctcggcacagcctgcccaggcagacacctattccgacctgatcaatgcgcagaaccagcacgccgcgtcggtacagcgcgaggccgaactcaagcagcagctggccggtgccagccaggacctggcgaataaggtacttgagctggacgatctgaccaacaacaagattgtcgccgcccagaacaaggtcacgcaggccaacgaggatgccgccaccgctcaggacgaggccgatgccgcatccggacgtctttccgccgcgcagaaagacaaggagacgctcgaggagcggatcaagcagaccggcaaggactacgatgacgcgcacgccgccgtggcccagctggcccgtgacgagatgcacggctcgaatgcttccgacgtgatgagcgtggtgacgggtgccaccagcacacaggacttcgtcaactccatgcagtcccgggacgcgttgtcccgcaacgaggcgaatgcggcttcctccgccgcgacctcactgagcacgtcgaagaaccgtggcgaacgtctggcggccatcgaaaagcagatcgctgtgctcaagacccagtccgatgagaaggccgcttccgcacagaccgccgccgaaaccgcgcaaagcgaacgtgacgctttggacaagctacgccaggagggcgaaacaaggcgtgacgaactgtcttccatgatcgacagtctggattcccaatccgccaagcaggcggcccagaccgtactgatcgcttcccaggtcgattcctacaatcgtcagtaccagaaggaacagcaggacgccgccaaccgggtggataccggtaaccagggcggtacgccgtctactccggtgacccccgctccggcgcccgctccggctc

SEQ ID NO: 2999 - DNA, 30222 bp, Unknown
  R19_24m  MAG No. k141_12564
gcaacaccgagatcgacgaatggggcatcacctatgcgctcggcgtggccgccctgcgcgcgctcagccaagtcgaacgcgaacttggcttacggcttggagggggattgacggcaaaaaaggctgcgggggagattgtggaaggtcgtccgggagactccgtaggggaatccattggaaattgtggggaaagcgttcgcgccctgcccaaagtcgccggaattctcgacgggccgagcgattacatcaccaaggcgctcaacacgttcgacgcgccggacgtgccgattccagccgatataacgaccaaagtcaaaggcgaccagcattgcgccaccgtcgccaccgcggcggtcatcgccaaagtgacccgagaccggctgatggtcgacctcgcgcaaagcaacccacgttacgccgcctacgaatgggctcataacaagggctatggttccgccgcacaccgtgccgccatcgccgaacacgggccgactccgctccatcgtgtctcatggcacctgacctgagccgcgtgcgacacgacagtgtgagcgctaacgcaaaactgttgtggacgcgctaaagtcagtattgattaaggtacaagcctggccgtgcacggatgccggccgccagaggggaggttaggtagcatggtgaccggccgcaagccaagcaaacgtccatccatgttcgaagtggccaagctcgccggagtcagccatcaaaccgtctcccgtgtgatcaatgactcgccggacgtttccgacgccacccgtgcgcgagtccaggccgccattgaccaactcggctaccgcccctccaactccgcgcgcgcactggcttcccgccgttcgcgcaccatagggctgatcgccggaggcctcaaattcttcggcccgatttcctccatctcatccatcgaatccatggcccgcgaacacggtctgttcatgagcgtgatgatggtccacgaggccttgtgcatgcagtccgaattcgacaacctgtgcgacaccttcaacgagcagaacgtcgacgccttcatcttcctgaccccgaccgacgtgatgttcgccgccgcctgccgtgcgcgagtcactcagccacgcgtcatcgtcaccgccacccacggccaaatgaccgtgcgtgagggattgggccttatctccaccgaaaacaagcgtcgcactgcactggtcggtatcgaccagtggggtgcaatggccaaagtggtggccttgctgggcgaatacgggcacaaatcggctctgtattttgccggtcccaacgaatggcgcgacgcccacacccgactggatgcgtggcgcaagctcgccgcctcccgatccatcgattcacagatcgtgcgctgccatacgtgggatgcctctgaggcatatgcgcacatgaatcatctcattgatgagtatgggcgtcgaggcacggcgttgcccaccgcggtcgtcgccgcgaacgacaatcaggccgtcggcatcatgcgcgcgttgcatgagcatgggcttcggattccgcaagacatcagcgtggtcggattcgacgacatgtctggcgtggataacatgtacccaccgctgaccaccgtgcatcccgatttcgaggggcttggcgtggccgccatgcgcgagacgctgcgtttgctgggggagggcggcgagccgaccttcctgaccacccagcacggcgtggggctgattcccgccgaggtgcgtgctcggcggtccttggggccggctccccggcggtaaattggcgctgttatcaaaccgttatgatgcgtgacacggtataagttgtgtcgaatgcaggttatcggtacaatgtttttttgaaattgtgagcgctaacatcctccccaaggaaggggataacaacgccggcgctccaaggcaaaggaaagatatggcagcaaccgacaacgcggccgagcaggccgcccacatcgccgagaagattcgcgctggcaagaccacgctgggcatcgaattcggctccacccgcatcaaggccgtcctcatcgacgacaacttccagaccatcgcctccggcgactacagctgggcctcccacttggaggatggtctgtggagctacaccaccgaggagatctggggcggtttgcagtccgcttacgcctccatggccaacaacgtcgagaccgcctatggcgagaagctcacgcacgtcggccacatcggcttctccgccatgatgcacggttacctcgcattcgacgaggccggcgaactgctggtgccgttccgcacctggcagaacaccaacacctccgaagctcacaagaagctctccgagctgttccagtacaacatccccgagcgttggtccatcgctcacctgtaccaggccgtgctcaacaaggaagagcacgtctccgaggtggcttacttcaccacactcgccggttacgtgcactggaagctcaccggtgagaaggtcctcggtgtgggcgatgcctccggcatgttcccgattgacccgaccactcacacttacgaaaccgcattcatcgagaagttcgacgctctgcctgaggtcgcagcccagccgtggaagctggagaacctgcttcctgagccgctcgtggccggcactccggctggcgagctgaccgaggaaggcgccaagctgctcgatccgtccggtgccctgaatcccggcatcgtgctcgccccgcctgagggcgacgccggtactggcatggtagccaccaactccgtgcgcgtacgcactggtaacgtctccgccggcacctccatcttcgccatggtggttctggagcacaagctcaaggccctccaccctgaggttgacttggtcaccaccccggccggcgatctggccggtatgagccacgccaacaacttcacctccgacctcaacgcttgggtcggcctgttcggccagttcgccaaggccatcggccagtcggttgatgccggtatgctgtacggcaccttgttccgcgcggccatcgccgacgacgtggacgccaactgcggcggcctgctgaactatccgttccgttccggcgaattcctggccggtctgcctgaaggccgcccgctgttcgcccgcagccccgaagccaacatgaccctcggcaacttcatgcgcgcccagctgttctccgcgttctccccggtcaagatcggcatggacgtgatgaccaagcaggagcacgtgcaggtcgactctctcgtgggccacggcggcatcttcaccactccgaaggtggctcagaagattctcgccgctgccttcaacaccccgatcaaggtcatgtccaccgccgccgaaggtggtgcctggggtatggccgtgctcgccaactacctgtggaacaccaacgaggatcacagcaacctcgctgacttccttgatggtttcgtgttcaaggacgcccagtccaccactgagaagccggtggcttccgatgtggttggtttcgaggacttcttcgcccgcttcaccaagggcctgcccatcgagcacgctgccatcgaaaccatcaacctcgaagataagtaagcctttctgacctccctctattgagagaggtccttgagattttgaaaaaacgtccatccatcacagtggaaaggaaaaccaataatggcaactttggctgattacggccccgaggttcgcgccgaggtcaagcaggttcgtgaggtcgtctccaacctgcaccagcagctgatcaagtggaacctggtcgtgtggaccgcgggcaacgtttcccagcgtctgcacaccgccgacctgttcgtcatcaagccctccggcctgcgctacgagtacctgaccccgtcctccatggtcgtgtgcgaccttgacggcaacgtggtcgacggtgccgaagccccgtcctcggacaccgcttcccacgcctacatctaccgcaacatgcccgacgtctacggtgtcgtgcacacccattccacctacgccaccgcttgggctgccactggtcagaacatcccgtgcggcctgacgatgatgggcgacgagttcggcggcccggtgccggtcggcccgttccgtctgatcggctcggaggcgatcggcaagggtgtcgtcgagaccctcaagaagtacccgaagtccccggccgtcctcatgcagaaccatggccccttcaccatcggcaaggatgctgaaggcgccgtcaaggccgctgccatgaccgaggaagtcgctcacaccatgtgggccgcccgtcagctcggtgacatcatcgagatcgaccaggccgacatcgataagctcaacgaccgctaccagaacgtctacggccagcactgatttgatggagtgtccgccgcgttgcggaaggctcgacgtaccttcgtacgccttcgccttccgcgccttgcgggcacacacatcaaatcagcgctgactccgccagcacggtggtgtcttggctcccctctctgaggggagcctcggtcggcgaatgaaacttaaacaaacccccataaacaaagaagtaaaggaagtaaccctatggttatggaaaaccccttcgagggcaaggaaatctggttcggcgttggttcgcaggacctgtacggcgaggaagccctgcgccaggtcgccattcactccgctgaaatggtcgactacctgaacaacaccggcaagattccggccaagatcgtcctcaagcccaccctgaagtcctccgacggtgtcaaggagttcatggtcgaggcttccgccaacccgaacgtcatcggcgtcatcacctggtgtcacaccttctccccggccaagatgtggattcgaggcctcgaagtgctgaccaagccgctgctgcagctggccacccagcaccacaaggaaatcccgtgggagaccatcgacatggacttcatgaacctgaaccaggccgcccacggcgaccgtgagttcggttacatcgtctcccgcctcggcatcaagcgcaaggttgtcgtcggccactacaccgatcctgaggtagtcgagaaggtcggcacctgggcccgcgcctgcgccggctgggatgcctccaacaacatgaaggtcatgcgctggggcgacaacatgcgtaacgtcgccgtcaccgagggcgacaagaccgaggccgagcgcgtgttcggcgcctccatcaacacttgggccgtcaacgagctcgtcgctgcgtacgacgccgtcaaggacgaccaggtcaaggagatcatcgaggactacaaggccaagtacgacgtcgacccggctctgctggacgccaagtacgactccctgttcatcgccgccaaggaagaggccgcgatggtcaacatgatgcgcgccaacggctgcaccgccggcgtcgacaatttcgaggacctcggcgctctgccacagctgccgggcgttggcccacagcgcttcccgtccgagtacggctggggcttttccgctgaaggcgactggaagaccgccgtcctcgtgcgcatcggcgccgtcatgggctacggccttgagggtggcgcctccctcatggaggactactcctacaacttcaccgagggcgacgagctcgacatgggctcccacatgctcgaggtttccccgtccatcggcaccatcgccaagccgaagctggagatccacccgctgggcatcggcggcaaggccgacccggtccgcctggtcttctccggcaagcccaccaaggacgccgtcgtggtctccatgtccgacgttcgcgaacgcttccgcctgctcatggacgtcgtcgacgtcgttgagccgcagggctccctcaaggagcttccgtgcgcccgcgccgtctgggagccgaagccgagcctgaagaccgccgttgagtgctggatcaccgccggtggttctcaccacacctgcatgaccacctccgtcggtcgtgaggcttgggaagacttcgcccgcatcgccggtgttgagctcgccgtcatcgacgagaacaccaccgctcgccagttcgagaaggaactggagctgtccgagatgtaccaccgtctcaacaaccagcactgattggcggagcgtataccgcctttcctcaggttcgacgtaccttcgtacgcccctcgccttcggacggcggtctccgcacgcgccaatcagcgctggcaagccagcaccgatgactaaatcagtctgctgactgctaccgctaaaaggggctgttccggaaaaccggagcagccccttttgctgttatcggcaactccccacaaacgcatcaaaaatcgcctgcgagcgtggatctaccttgtagagaaactcgggatgccactgcacggcccacaggaagtggcttgccggccggtacagggcctcgatcacgccatcgggcgcgacggccatgacttcgagaccgggtgccacatcacgaaccgcctgatgatggtagctgtttaccgcaatctcagtctgccccgagaacaatgaagccaggggagtgccgggcaccaaggaaacgctgtgtccgaacgcatcgtacggcggattcatatggtgttcgatatcgctcggatgctggcttggcagatcctgccacaacgtgccgcgtagcgctgcattgatgaactgaatgccacggcagatgcccagaatcggcttgtcccaagccattacagctggcagcagaatcgattccattcggtcgcgctcaggagagagcacctcgttacggccggtggcggaggccgctgcaccaaccatcggtcccacatccggcccgcccgtaaacagaaacgcgtcaaaccgttcggcgcattgcgcaagaatgtcggcgtcatcggtcagcggcaacatgatgggcgtaccgccggcccgcattatcgcctccatatatccgggcagcatccacagactatcgcgcccgtaatccatcagcggagtcaccgcaatgagcggtcgattcgtagtcatgcctgcctcttttcgcccaagtgtcgctttcgtcgttctgccgcaaatcgcttgatccagtggccaataatgccgtcactgtaccgaaccaatgtaaccggtcggccagcattatttcgtcagccagtcgcgacgagatcgcacaatgtgccaatgatgggggcattcggtgcggccttgtcaatgttcgggccattgcacgttcggcggggaaagcatgcccccgtccgcgcatcgtgatgaacgagtaaggttgacggggagggagaatcacatgaaccaggcatgcgtacgcaacgacaccatcgacgcgggcaaccatcatggccgaccgcaataccggtcgttcctgcgatttctgacatcgcaggaacgcaacgtcatttggctgttgctggccgtcgcttttcttccggtggacggcaccacgcttggcctgtacgcgccgttctggtcgccaatcagtccggcgctgttcgccgtgtactgcctatgcaattggcggcaactgcgcatcgcagccaaccggtacctgccaatgttcctcctaccggtggtctgtataatcctgtccatcccgggatggctgaagttcggcatccacctcaacgccgcgttcatgagcatcaccggattgctgggcgtgctcgccactttgggtgcgatcgcccttgcgttcgacatcaaacgcattccgtggcgtacgccattgcggattctcatcgcatcatactgggtttccttcggagtgggcgtcgtgcaatggctgtccatccgtctgcgcgccaaaccgttgaccgactatttctcgcacctcatgtaccggcaatacatcagcgacaactcggtgtggggcggcggccgtccgcagttcctgttcgccgagcccagctatatcggcatgcacctgttcggcatactgcttccgctcatgtggctcatgcgcgggcgcgaccgcatctacgccaaacggctgcgtgacctcatcgtcacgtatgccgtcggcgcggtgctcatgcaagccggcaccagaatcgtcatcgattccgtcgtggcgttgctgatcgcccttgtggcgcgcaccgattggcatgacggcgcacgccgcgtccggggcatgctgcagattctcggcgcatgcgcactgggcctgctgggtgtgctggcggattccagactctccgccatcgcggagaacggggccgagggagacggctcgttcttcgcgcggatctaccaaagcctcgatccgatatgcggattgctcacccatccgtggacgctgctcaccggttatggcgcgggcaacatcatcaatgcggtgtgggccggcgcggccaaagccggacggctgctggacggtcttggtatgaacggcggcgcggccacgggattcgcggccggcgtgaacgcggacacggtgtggacgatgtgcgcgtataccagcgtcatcgccgaatacgggctgatcgggctggccatgctggtcggagcctcgatggtctgcatgacgcgcgggaggacggtatgccgtggcggtgcggatggcgcatcgtccgacgggctggcgcacggtgtttgtgtcaccgacgttgccgacgttgctgatgttgccgggggcaatagtggtgatggcgttgccgacgttgctgatgttgccgggggcaatagtggtgatggcgttgccggcgcgggttcgggcgaatccggcgtctggcacaagaccgtcatctgctggctcgtcctggtcgcatacctgtacatccaatgcgagaactatgcgttcgccgctctgccgctcctcgtgttcgccgcctcgaaggtgaggcgcgagcgctgattcctctcgggccgacgcatcgacgcggcccgagatggaccaaaatccagaataaacgacattcgccgctgttccgtttttcgcccaaggcgtatctcttcccgtatcttgaggtgcatcatgtattgtcgcggctaactaaccggcgaaacgcggcatgtttcgcattttgggcgaaaagcccaaggcccacaggaggtattgatgacgttcgttgcacggtcggtgcgctatgtgctcagaaaacgagtacgaaccatagtgctccttatagtattgaccatcataacggcgagcatgctatccacgatcgcggtttctcgggcagctcaacaggccgccggacgaatcgagaaggaagcggtcggcgggttcgtgctggccagcaacctgcagggcagcatgctcacgcctcgcggaggtggcatggtgcgtcccgccgacgtgcgcaggatcgcccaactgcccggggtcgattcgtatatggtccgtcagaacgccaccgctgatctcgtgggggcgaatgtggcgaaggtccccggcggcgatgattacgatgcgaccaaggagcagcaattcggcaacgccgccaacgtcataggcacgaatgattcgtcgaaactcaacgtgttcacgtcgcgcacgctcggcatggccgaaggacggcatctgaaggcctccgacaagtacacgtcgatgatccatgaggatctcgccaaagccaacgggctcaaagtcggagacacgctcacgctcaaggccaacgcctacgacgccgacaacgaatcacattcgacggcgaccgtcaagaccaccatcgtgggcatattcaagggcgacagcgccagaaaggtatccagccgagcggaactcaccgccaacaccatctacaccgatctggataccacacgcgatctgtaccagtacaaggacggcaaggaaatataccaggacgccaccttcgtgctgtccaagggcgttgacgtggagaagaccatggacgccgcaaagaaactcccggtggattggaacaactatcagatcacgcgcaacgaccagtattcgtcgagcatgctgcatgccgcccgcggcgtgcgctccatgatgcgcggcgccctgatcggcgtgaccgtctcggccgtgctcgtgctcagtctcatgctgctgctgtggatgaacgaccgccgtcaggagatgggcatactggtgtcccttggcgtcggcaagccctcactggtcgcccaatacctcaccgagatggtgctgatcggtctgccgtcccttgccctcggctggctgtgcgcgcagggaatggcccaatggctcggcaccacggcgctccattccgtgaacgcctccgcggcgaaggagctgagcagcatggggcaggtcggcggcgaccttgaatccagcatgtcggtgcgcaccctggattcgctcacggtgtcggtcgacgggaccgccatgctgtacgtggcgctcggattgttggcggtgatgctggtgtgcgtcgcggtggcgtgcatgccgatgctgcgcaaatcgccgcgagacctgtcggagaatcgatgatgagcatgaatgtgtggaagcgtgccacgttggcgatcgtacgcaagccggtacgcagcggcatcatcggtctgctgatgctgatggtcttcacgagcctggtggcgcaggtcggagtctcgacggccctgcgtaccatgtccgacggcatcggcgcgggcatgggcatagggtttaccgtcagcgccggcgagaatcccatcagcgccgaggaggcgagccggttctcgcgtatccccggtgtgacgaagaccgcctatgcgacgaagaccttggcgcaggtggatggcgcgcgcccggtcatgcctcggcagggcccccgattggactccgatctggccatgcaggtcagcgtgctgggcaccaccgattcctcattgtccgaggaattccagagcggcctgtaccgcctggagcagggccgccatatctcgggcgacggcgacaatgtgctggtccaccgcgacttcgcgctgcagaacggcctatcggtcggctcgacattccgtctccggcaggaggggcgcaacgccacggtgcgtgtggccgggatcttctccggcaacgtgcaggcccaaagccccctgccctcggacacttccgagaacctcatctattcgggtaggcgagtgacctccgctctgaccggaaacgaccagatcggcatgatccgatgcctgtcggataatccgcaggacctgtccgcggcggtcagtcaggccaagaccatggccggtggcaagtacgacgtcaccgacgattcggcccgactctccggcgtcctgcaatccgtgcagacggtgcgtgatctggtgcgcatggtgctgctgtccgtctgcctcgcggacgtactggtgctggcgatggcgctggtcttctggattcgctcacgcatccatgagataggcacgcttctggccctcggcatcgacaagatgcggatcgtcgcacaactcgccatcgaaaccggactcatggcggcggtcgccgccctgtgttcgctgggcaccggcgccatgctgtcgggatacgtgtcttcccgactgttgcgcgattcgggcgtcgcgccgttggaatcgttgcacgtggaggccttgccgcctgagcagacagtgctcatcctgctgctcggatgcgcggtcatcgccgtggcccttgccgtgtcatgcgccgccgtactgtccaaatccccgaaatccattctttcctctatgcgttaggagtcaccaatcatgtctaactgtctgcaactggaccatgtcgattacgcctacggcgcggcgaagatccttgttctctcggatgtcagcgcggatttcgaatccgggaagatgtatgcgatcaccggcccgtccggcgccggcaagagcacgctgctgtctctgctggccggcctggacgccccctcccggggagtggtccgcttcgagggggaggacatcgccgcatcgggctatgcgaagcaccgtcgggagcacgtgtccctggtgttccaggaccataacctgatcgactacctcacccccgaagagaacctgcggctggtcagcaccaaggccgatatgaagatcctcgaggaactgggtttgagccgtgaggaatccaagcgcaacatcatgcacctgtcgggcggccagcgtcaacgggtggcggtcggccgcgcgctggtcgccccgggccgcgcgatcctcgcggacgagccgacgggcagcctcgacccggagatgaccgacgaggtgattcatctgctgcagcatgccgcccatcagctcggcaaatgcgtaatcgtggtgacgcattccaagcgtgtcgccgactccgccgatgtcgtgctgcgtctcaggagcaagaaactgacccgggcgtgacccacctgggccgggcggcacccatacaccgcttcggcatttcggcaccccggcgaccgggcactccggtatcccggcccttcggcattctggcacccccgcgctccggcaccccggcgacccactcgcgttgccggggtgccgtattcgctctgcgccataatgtgcgtgataatggaaccatgccagtgatgaatgatgaagtgcccggcgaggttgaaccgcaccccgattgttggactggagtaatacagattcgatgatcggaggtgcggttcaaaaggcccttttttgtgtcggattacgaaccgcgcgtttcaccgcttgccgttgtagatctcgttgtcgatcacatcggcgaacacgcggttgacggccgggcgcactaccttcagcgacggcgtcaggcacttgttctcctgcgtgaactgcgtgcccagcacggcgaacttgcgcacggattcggcacgcgagaccgtcgcattcgccttgtccacgtactgctggatctcctcgcgcaccgcggcgttcgtggcgagccggtcgaccggcgtctccgtggacaggccgtgcgcgggcagccaaatggccagcgactccgggtcaagtgtcaccagcgcgccgatgaacgggcgctggtcgcccaccaccacgcagtgctccacgatcgggcacttggcgatctcctcctccagcggaatgggggagacgttcttgccgccggcggtaataataatgtccttgattcgaccggtgatgatgatgcggccggcgtcatcgatctcggccaagtcgccggtcctgagccagccgtcggcggtgaatgcctcggccgtcttctccggcagattgtggtagccgcggaacacgttcgggcccttgacctgcagttcgccttcgtcggaaatgcgaatcgaggagccgggcgcgggctggcctacggtgccgatcacattgtcggtcacgcgcgtggcggcgaacggggcggcggtttcggtcatgccgtaaccctgaatcatcggcagaccgatgccgttgtagaaatgcgctagatcgagcgacagcggtgcgccgccgcaggccacgtacttgatcttcgggcccagagcgccgcgcaccgtgcggtagacgagcgtttcgtacttggcgcgctcggcgatttcggcaaacgtgtgctgctcgccggcctgctccttgcggctccagacgcgcgcggcctcggcggctttgacaaacaggcggcccttccagccggcaccggccttatgcgaggcggcgttgtacaccttctcgaacacgcgtggcacgcccagcaggtaggtcggttcaaacgaacgcaggtccggcagcagggttttggtgtccggcagatagccgaccacgccgtcatcggaggcgatggaggcgtactggataaatcgtgcgaagcagtgggccagcggcaggaagagcagcaggcgtggatggtcgtcaagcaccacttcatgaagcgcctgcgaagcggtgatggtgatggacacgaagttcttatgggtcagttcggcacccttcgggttgccggtggagcccgaggtgtagacgatggtggccagatcgtcggcgcgcacggtggccacgcgctcgttcagttcctcgtccgaaacagccacgcccagaccttcgagcgcgcccagtgcgttgccctcgagcatgagaatctgcttcaaggcagggcagtggtccttgaccgagtcgagccggtcgaagcgctcgcgattgtcggcaaaggccagcttgaccaccgaatcgttcatgatgcgctgggcctgcggggcggagtcggtgtcatagatcggcacgcttaccgcgcccaccgcggccagtgcgaaatcgagaatgccccattctagacgggtggaggaaaagatggtcaccgcgtcgcccttggcgatgccgagcgcgatcaggcccttggcggccgagaccacgcgctcgtggaattcgccggtggtgacgttctgccagcggccggggccgattttcttggcggcgattaccgtgtccgcgccggtgcgggcaaggcgatcggtaagtagggagtagatggtctggttgtcgcggatctcgatggattcgccaggcgtggtgtagtggtcaagcataagcgggccgtgtccttacgtgcgttgcgtgatggctgttgacaaaatcgagccattctgacaagttaggttacgctggcgtaaggttgcgcgcgttgtgggcaatggagaagttgtctgtctggttttgtggattgtatacaacgccgtgtctaaccggtttgctctacggttatgacaccgtgtccatttcgggagccattgacttcctgcaggacaagtacgcgctgagcccggccctgcagggtctggtcatcagctccatcatgatcggcggcgtgatcggcgccggcttctccggcttcctgtccgataagtacggccgccgccgaagcactggtcgccgcgcaaaaagcagcactaggccgcgtttgctgcgtctattggcgaattgatcatatgggtcgtctgcgtgcagacgacccttttgcgttccgtcggcttctgacaccgtagaaacgtgctttctcggcttcgaggggctgattttgccttatctggaagtctacttccacttcgaggggctgatgcccaagtagacacggccctaaaacggcggaatgacgttgacgtgtagccgtttatacttccgattacatggatgaggagcccctcgaagcggagatagacttccggcaaatgcgaaatcagccccttgaaacggaagtaggcctccggcaaacgcaaaaattagcctcctcgaaacggataaatgcacgtattgggtgtagtggatgcttcagcccctgatatcgaagcatatttttctggttggcgcgtctagcatgcgcactccgcaatcgataattctgtggcctctctcactttaaaagtctggcgtgtgcgagggcgttcgcttaaggtgaatgggattgcgcggaatgtggagcgcagggtcatgaccatgcgcgtgctgcagatccagctgcgctcgctgaccgccatggatatcgtggcctacggcggtgcggcggccgacattggtgtggctctatggcagtatgcgcataccaccgcagccgccgcaggagccagcaccgccggctggtcgccgatcatgctcgccgcccacctgcccggcgcattcgcctatctggcctacggcctgcaatacctgatgccgttcggtgcgggcttccgctcaccctcgccggactgctgctgattgtgctgctgtccgccgaattctttattcccatgcgtcagcttggctcgttcttccacgtggcgatgaacggcatgacctccaccaagcgcatcttcgctctgctggacaccccggagcccgagcatggcacggcgaccctgccggccaacgattccgattccgctgacgacggtctgacggtccgcttcgaccacgtcggctattcctatgatgatgccgggcacggcgactccaagtccgcatccgcaaagaccgataagcaaggtgaaaccagccccaattccgccgtcgctcctgcgctcaccaacatcaccttcgccgcacggcccggtcagttcaccgccattgttggcatctccggttccggcaagtccacggccgcctcgctgctcgccggtacactggccggttaccgaggttcgctcacgctgaacggcgtcgaggtatccgatttgtcaggcgaaacactggccggagccgtcactgtgattggtgccagcagccatctgtttgcgggcgcattgcgcgagaatcttctgatggccttgcccgatgacgagattcctgattcgccggattccgtggactcccgtctgtggtccgcgctcgagcaggcgcgcattgccgacttcgtgcacgcacagccgaacggactgggcatgccgattgagtccgatgccgccaacctgtccggcggccaacgccagcgcatcgccatcgcccgcgcgctcctgcatgattcgccggtatttgtgttcgatgaggcgaccagcagcgttgacatggaatccgaagagctgatcctggatacaattcgcgaattggcgcaatcccgcggcaagacggttattatgatcacccatcgcatggccaacgccgaacacgctgatcaagtggtggtgctcgaacacggcaagtcggttgagaggggcacccataccgagctgatgacggcggacggcgtctacgccaagctgtttaccacgcaggcggatattgagaacttcggagaaggccatgctcggcgtgtgctgcaggttggttcccgcaagcaggagctgtccgacgacagtcggactgagggtggcgcagcgcgcgtaagcgcagaggcgggtatgacggttgaccgcctgcagtcagctttgccgacggcttccgttggcgggagtgagcaggcctcggctgagactccggctggtgttgcaaatagcgattcgtcttccaaaatgagcacattccaagtgatcaggcgactgcttaaggaatcccgacctctggcaggactgatggcagcggcctccaccgccggcaccatcggccatctttcggccactttcctgcccgtgttcggcattatcgcggcatttgcacttaccggtaatccggtgtggggcatgggtgttgcgcccgccgtcatcatgatgattatctgtgctcttctgcgtggcatcacccgatacattgaacaatatctgaaccacaatgtggcattccatctgctcgcactcttccgttccaaggcgttcgccgcgttgcgcagactggcgccggccaagctcgcgggcaaaggtaagggcaaccttatcgccatgctgaccaccgatgtggaactgcttgagatcttctttgtccacaccatcagtccggtggccatcgcggtaacctccaccatcatctacacgattgtggccgccaccctaagcccatggatggcgctggcgttgattgccgcccacctggttatcggcatccttgtgccgcgattctttgccaccggcgtacgtaaccttggccctgccatccgtggcgctgccggagaactcgacgatgtgatactcgatgacatgcgcggcctggacgaaatcatccgatttggccgcggcgaggaacgtgcgcaggccatcgaggaccgtacccatgcgttgtggaaggatcacaccaaactcagcaaggtcaacggccgtttcaccggaatcagcggactcttggtggctgtgctcacagcggcttcggtcgccgtggctattgcctgtgccggcgcgaacccgcagagcattccggctctgattgccgccttcgtgctgttcgccagctcgttcgaaccgactttggcgctcgccgccttgcccgctaacctgactcagaccttcgcgtccgctagccgactgttcggactgatggacgaggtgcccgctgtgaccgagaacggcactgttgtgccgcaggagtatatgggcatgcgtcttgatgacgtcacctttgcatatgcgggggagcatgaagtcctgtccgacttctcgcttgacgtgccgcagcatggcgtgctgggtatccaggggccgtccggccgaggcaagtccaccatgctcaagctgctgctgcgctactgggatccgcagcgcggtcaggtgacgttgtccggcacgccgttgcccgaggtcgatgtgcatgctcgccgacgtattcaggccatgatgagccaggaaatccacctgtttgatggctctatccgagacaatctgctgattgctttgcctgagtccgaggttgaagctgcaaatgttgcaggcaatggggaagtgggtgccaagaccgttgattcccgacagcagcagttggcggcgcaatcggcagagggcgatgccgttcaggtggcagcagctgacggtctcgatgctcgtttgcgtcaggctctcgccaaggcctccgtgcttgatctcattgattccctgcccgatggccttgatactcaggtaggcgagttgggcgaccgtctatccgaaggtgaacgccagcgtatcggtttggctcgtgtgttcctgcgcaatgctgatctggtgcttttcgacgagccgaccagccgtttggatgctttgaacgaggctattattctacgttccattcacgctatggccgtgggtgagcagcatgcagacaaggagcgcggcgcggctgtggtgctggtctcccaccgcgaatccgccatgcgcattgctgatgcggtactcaatctgtaactgcctgtaactacgcgggaatcgcatcgcattgcgttacgttaccgcgttgcattgcggttcctcgcgggtggcggcgatgccatctccggtcgtcattgcgttgctgcgtttgtgttgcgatatgtgatgcggcaacgcagcaatgcggcaatgcaatgtgatgtggcaacgtggcaacgtagcgatgcaataacgcggtaacatggcaacatggcaatgcagtaacgcaacgcagcattcacgccttgatcaaagcgccgatgacgctgtcgaacgcagtgagactgagaggagccaaagcccaaaaccggcaaacacagcaccggccatgagccgatacaataaaggatttgattaatatgactactcatagagcatttaggtggccgtccctgctgacggaatccggccgcggcatcgcgttcggcggcgactacaacccggaccagtggcccgaggagacgctggacgaggatatccgtctcatgggtgaggccggcgtgaacgtcgtgtcgctggcaattttcagctgggacaagatcgagccggtcgagggcgcgttcacgttcgagtggctcgaccatgtgatcgacaggctcggcagagccggcatcgccgtggacttggcctccgccacagccgccgcgccgctgtggctgtacgaatcccatccagaggtgctgccggtagaccggtatggtcataccgtcaacgcgggctcacgccagtcgtggcagcccacaagcccggtgttcaaggaatacgcgctgcgcctgtgccgcaaacttgccgaacactacaaggacaacccgtatgtgaccgcctggcacatgggcaacgaatacggctggaacaaccgctacgactactccgacaacgccttggccgcgttccgcacgtggtgcgaggccaagtacggtaccatcgacgcgttgaacgaggcgtggggcacggccttctggtcgcagcacgtgaacagtttcgacgaggtgctgctgccacgtcacatgggcggcgacgccatggtcaacccgtcgcagcagttggattacgagcggttcggcaacgacatgctgctcgacttctacaaagccgaacgcgacgccatcgagcagatctgccccgacaagccgttcaccacgaacttcatggtctccaccgaccagtgcgtcatgaactacgccaaatgggcggatgaggtggacttcgtgtccaacgatcactacttccatgagggcgaatcccacctggacgaactcgcctgctcggacgcgctcatggactccctcgcgctgggcaagccgtggtacgtgatggagcactccacctcagccgtgcagtggaagccgctgaacacacgcaaacgggccggcgaactcatgcgcgactccctggcccacgtggccatgggcgccgacgccatctgctttttccaatggcggcaatccaagtcgggcgccgaggcgttccactccgccatgctgccccacgcgggcgccgattccaaggtcttccgcggcgtatgcgagctcggtaaggcgctgaagaccctctccgacgccgggctgcagggcactgagctcgagcgtgccggcacggcgatcctgttcagcgcggaatccgaatgggccacacgctccgaaaccctgcccagcatgaaactcaaccactggcacgacgtgcgcgactggtaccgcggcttcctggatgccgggctgcgcgcggacgtggtgccgctcgcctacgactggaccggctacaaaaccatcgtgctgcccaccgtgctcagcctgtccgacgaagacgttctccgtatcgccgacttcgcgaaggccggcggaaccgtcatcgtcggctatgccgccggcctgatcgacgagcacttccacatcggcctcggcggctaccccggcgccggcaacgggctcctacgcgacatgctcggcatccgctccgaagaattcaacatcctcggtgaagaagccgaaggcgagcccagcgaaatcagcctgtccaatggtctgacgacccgcctgtggcagaacgacgtgacttccgtagccgcggacaccgcagtgcttgcctcttacgcaggtgagtccgccgccgactgggagctggagcgcacccccgccatcaccagccgcccctatggcaacggtaccgccatctacgtgggctgcgacctcaaccgtcacgacattgcccagctgctcaaagcacttggctcccgctggcgggagctgtcggcgcagtcgactgagggtggtcaaactccaacctatcccaccacagatccccgcatcctgcacaccatccgccgatccgcagacggctccacccgcttcgatttctacctcaaccgctcaaaccagcccgtcgccatcaacggtgtggaaggtgatcccatcatcgcccaccgttgcgagactgacgccgttggatatacgctgaaccgcaacgccattcttatcgctaaaacgtcctgctaaaccgcgctagaatggcaatgttgtccggatagaggagtgcggcatgagcgacgagaaaacagccaagcgtcgagtgacgctacgcgatgtcgctcaggccgccggtgtatcgctcaaaactgcgtcgaacgtgatcaatggctccgggcgtatgacagataagacccgtgccaaggtcgagtcggtcattaaggacctcgactaccgagtcaacgtggccgcccgcaacctcaaccgcgatcacaccggcttcatcaccctcgccgtgccttcgctgattccgccatatctggccgagctcgccaaccgcaccatcgaggccgcccgtcagcgcgactattccgtatacgtcaccacgtatgcggaaggctccgcgaaaggcgcgcgcgatctgctgaagaagttcaactccacggtgtccgatggcatgatcctttccatgagcgaggtggaaaacatttcgcccgatgatctgaaggttgattttccgctggtcatcgttggcgcgcgtaccacgtggggcattgtggatcacgtgaccccagacgatgtatccgcagccgccatggccgcaggctacctgtatgaccgcggttccaccagacttgcagtgatcggtgcccgtgacgtttacgacgaagatgcattgctgaatgccgtagaaggcaacgcgcagctgcgtctgcgcggcatcatcgaagagacccgtaggcgtgggctctccttggatccgcagctgattggcaacaccgatcaggattggaccatcggagccggtgcccgtgtgacccagcggctcattgattccggcgtgccattcgacggtgtgattgccttgaacgatcagttggccatcggcgcattgaccgctctgcgcaccgctggttatgaggtgcccgtgcaggtgcaggtcatcggcttcgataacaacgaggaagccccctacctgcagattccgctgaccaccatggattcccgccttgactggacggctcccacggcagtgaatcgcatcctcggacgcatcgacggcagcatcaccaagtccgaactgctcaccaccgaatcccaggtcatcgcccgcgcctccacacgctaaacaacattgctgtaatgctggtgttgctgtactgggccgtacgaggcgttgatacaccggttgaccaacacggcataaagtgctaaggcgacgattgcgtggtacacagctgtaccgcgtggcgcgtaaggaaaggaagcgccaagcatcactgggcgttcgttctgagcgttcaccattcaaaggagaaaaagcatgcgccgaaataccgcgcttactcgcattatggcatccggcgtggccgccataatgctctgcgcaggaggcacgttcactgtaaacgccgccgaagaagaaccagttaaagccgacgtctcggtcaaggccatccaaggcttaagcgatgatttcatcggcggtatggacgtctcatccatgctctcgctggaagaaagcggcgtcacgttcaagaacgccaatggcgaggtcgaggatttgttcacgttgctcaaggaatccggcgtgaactatgtgcgtctgcgtgtgtggaacgatccgttcaccgcagacggccaaggatatggcggcggcaacgtcaacgccgatcgcgcactgaccatggccaagcgagccacggcagcagggctgaaagtgctggtcgacttccattactccgatttctgggccgaccccagcaagcagcaggtgcccaaggcgtggaaatcctttgaaggcgacgcggacaaaaccgccgacaccgtatacgactacaccaagcagactctgaccacgttcaaacaagccggcgtggacgtcggcatggtgcaggtcggcaacgaaaccactgcgaaaatcgccggcatctccggctgggacggcatgtccaaagtattctccgcaggttccaaagccatacgcgaagtgctccccgaagccaaggtcgtcattcatttcaccaacccggagaaagccggcacctacgccacttacgccaaacagttgagcaaccacaatgtggacaaggtctcactcgtcaaaaagaccgaaactccggtgaagccatccacggagaacctggacaaggccgtggccgaagccgggaaaatcaatcgcgatgagtacaccaacgagtcgctcgccaaactcgatcaggcgcttgccgccgctgacgtgctgcttgccggcagcacctacaccgagcaggacgtgaacgatgtgatcaagcttgttgccgatgccattgccggcctcgcccaaaaggaggtctccagcctgaccgtcacgccaagcaaaaccacctatcaggtgggcgatgccatcgatgccgaccatgatctcaaggtcgtgggcaactattccgcaggcatgggcaacgtgacgctttccgctgaccagttcacgctcgattacgatttctccgctcccgctgatgcggcgaaggttaccgtaacgctcaagtcgaatccgaatgtcaccgaaacctatacggttgcggttaccgctcgggccgaagatggttccggcaacggctcggacggtgcgggtaatggcggggctactatcaatcccgatacgggcgagggcgataagaccaacggtgcgaatggcgacaagatcactggtgtgctgagcaataccggtagcgcggtgactgccgtgggtcttgcggttgtcgttctcggcgtggccggcggggtctcgcttgctttgcgtcgtaagcgctcctgatagagactgatgcggcattatgatgcggttgccggcagccggcaaccggctgtcagatgccatctgtcggctgtcgtttatcggttgtcggctgtcagatgcgtctgtctcggcgcagcgatgcgattctgtcccggttcgtgcatcaatcgtttgatgtgggtaccaggacagaaatcactgtcctggtttgcgaaaacgggtgtttttcgcgtaccgggacaattcccgttgccccggtttgcacgtcaatcgttctacgtgagaaccgggacagtatgttgatttcgggattggctgtattccgccgattctgtttgtcggggtatgtggactttggggattgtcttgtcctggttctcgaaaatggcccgaaattgcgtaccgggacaacgatttctgccccggtgcaaacgtcaatcgattgacgcctgtaccggggcaaattcgcgcccgggaacaatagggcgagggccggtcgcaggagtagagcgtgatgttgtcatgattgcgcccggctctcccacacggaaggccgggcgcaatcatgccgtttggttgcagcacccgcacatcgcctgcataaccgtgtacagtggcgtgtagttgcagtacatgaaggagcatcacaagccatgaccaacggacacatcaatcccgccaacgtgccggacatcgccttgaaagacggccattccattccgcaggtcggccttggcgtgctacgtatcgatgacgagggcgtggcccctgtcgtcgaatctgcgctggaagccggataccgccacatcgatggcgccgccggatacaacaacgaggccggcgtgggtcgtgcgctcgccgcttccggatacaacaccggcgccaagcgcgagaccctgtgggtcaccaccaagctgcgcgactccgagcagggctacgactccgcgctcaaggcattcgacaactccctgaaactcctccagctcgattacgtggacatgtacatgatccattggcccacgccgttcgactggcgcagcaccgacacctggaaggcgttcgtcaagctgcgcgacgaaggcatggcacgcacgctcggcgtatgcaacttcatgcccgccgatctgaagcgtctgcacggggagaccggcgcatggccggccgtcaatcagattgagctgcaccccacgtggcagcagcgcgaagtggtggcgttctgcaagaagcacggcatcgccgtggaggcctactcgccgatggcgcgtggcgccgacctcaacgccggcgacggcaccatcgagaagatcgccgccgcccatgaggtcagcccggcccaggtgattctgcgctggcacatcgaaaacggcacgatcatcatccccaagtccgtgcatgccgaccgtcagagggagaatctcgacctgttcggcttcgccctgaccgccgatgaacacgctgccatcgacgccctcgacggccccacccgcgccggccacgaccccctcaccttcacctatgcgtgattgatggcacgtcgtaacgcccacttccgccgtcgtttcaacgcctctggaccgctggagcgcgtgctgattctcatcgttctcgccgtagcaatcggcgtgaccatcggcctgttactgccgcaggtcagctccgacgtggccaaaatcaccggtggctacactgccaccggttcagccgccgacactttgaacgcgctcgccgtagacgacaaccaaagctcctccggctacgaccgcgattccttcggtttccgcaccaccgacgtcgacggcaatggctgcgacgtacgcgacgacgtgctcgcccgcgatctcacggacatcacctacaaatacgccggttcctgtgtggtcgagtccggcacactggccgatccgtacaccgcccagaccatccatttcgtacgtggccgcgccaccagcgccaaagtgcagatcgaccatgtggtggcccttgaaaacgcttggcaatccggtgcgcacgactggtccactgccaaacgccatgaattcggcaatgacccctataacctgctggccgtcgacggtccggccaatcaggagaagggttcggcttccgccgcctactggctacccaccaacgccgactaccgttgcgactacgtggcccgccagattggcgtcaaagacaagtaccagctcaccgtcacctcccaagaaaaggacgccatgctcgccgtcctccatacctgcccgggccaggccgtgcccgcagacgaataggggctaccgctcaggattgttgagcataggtgcctgcccctcgtcataagcgcgcaggagccgtcggagcaaaaatgtggtgaagtatggtgcggtgaacacgtgttcgctgctaccgatattgccggcggatagtttcacgccgaactgaatttccggataagaatccgaagcgattagcgtccgcatggatttggcggtgccttttttcgatttcacctccaccggcaccagccattcgcgcgtgcggacgaagaaatcctgttccagtgtggaatcctcttttttgtagtagtacaggtcatagccggatttccgtagcgcttcagagacgatgctctcgtacatagcacccttatagacaccaagattacgattggcccgcagatcatcactggcctcgtcgtcaagcatcgctacgaacagaccggtatcgccgaaatatatcttgaacttgttttcgtcataattgcctttcaacggcagttcaggataggacatacatcggcagatattcaccattcccgaggtctcaagccattccacgcatcctcgatagtctttgaaacgcgctccgctggcaaccttgctgatttggaacttcttgttttccttggcgagttgcacgggaatatggttgaacacgttgagaattcgtgtctgatcgagtccttgcgtgtatttgcggatatcctcctggtagtccaaaataagctggcgctgcaattgcagtgttccctcgaacgtgccagtgcgtatatgggaggcgacaaccgcaggcatgccgccaagcacgcagtaatccataaatgccgtggagaagacgttcatttccacttcagagaatggcgtagcatcacacaggtgggtgaacatgctttcgatgacggcctcatcgtatccgcgagcccacagaaattcttcgaagtccaacgatcgcatttcgtagtcggtcttatatcccacgctattgctttcgatttgcttatagctgatgcccaacattgaaccgctgcaaatcacatcatatttgccgtcgattttaaagaacttcagtgcagtggcgatatcaggatgggcctggatttcgtcgaaaaagatgagcgtatcgcccggaatgaactttttggctgggtcgatcagggaaatattgcggacgatggtattcgcgccataaccgtccgcagtgattgcacgatatttcggttcctcaacgaagttgatttccactaccgaacggtagttgtgtgcggcaaagtaatcgatagtctctgtcttgcctacttgacgagggcccttgatgattagcggggagcgattcgggtcggatttccatgcattgagataggcatcggctttgcgtttgagatacatgaggagcccctttccgaattactgctatatcaatgattttacactttcatgagcgagttttcggcggtttttcacatttcatgagcgagatggcgggaaatgccagctgccagtccgccggtcatccatcaatcgtccgcagattgtccgtctgttgactcgggaaacatgcctgcgctataactgtgcgcggtatgaagggaacaggtacaaacgatatggcagtaacacacaccgaagcagatgccactgcggcaaccgctatgacgaacgctgtggcagacatcgaacaggaaacaccggaaatcgggaaggaacgccagcttgccggagtcggaaccggggccggagcagggacgaataacaataagaagccgcatgaccatgcgctggccagcatccttggccccgcgttcgtggcggccgtggcctacgtcgatcctggtaatgtggcggccaacatcacctccggcgcacgatacggctacctgttggtgtgggtgctggtgctcgccaacgccatgagcgtgctcatccagtatcagtccgccaaactcggcatcgtgaccaacaaatccctgccggaactgctgggcgagcgtatgagcgatgccggccgcttcatgttcttcatgcaggccgaggtcatcgccatcgccaccgatctggccgaggtgatcggcggcgccatcgccctgaacctgctgttcggatttccactgttcatcggcggtttggcgattggcgtaatctccacggtgatgctgtggttccaaggcggcaagacacagaccacattcgagcgcatcatcatcgtgatgctgctgattatcacattcggcttcatcgcgggtctgttcgtagccccgccgaaccccggcgaagtggtcaaaggcatgattccacgcttccaaggcgccgactcggtgttgatggccgcctcgattctgggcgccaccgtgatgccgcacgccatctacctgcactccacgctggtgaacgaccattacgcaggcggcgaaaagccgtcgatcaaaacgcagctgagaggctcgaaaatcgatgtggcctgggcgctgttgctggccggcaccgtgaatctggcgatgctggtgctcgccgccaactcgctgcatggcatgtctggcacggactccatcgacggcgcacagcgggcgatcacgcaggtgctcggcccggtgatcggcacgatcttctccatcggcctgctggcttcgtcgctgagctccacatcggtcggcacgtacgccggctcggagatcatgcacggtctgctgcacgtcaacgccccgatgtgggcctgccgcgtggtcacgctggtgccggcactgattgtgctgtggttcgccaaggacccgactcaggcgctggtcatcggccaggtggtgctttccatcggcatcccgttcgccgtgattccgctgatgcgatacacgcataacaaggaactcatgggcaagtgggctgatggaaccgtcaagcacgtgatcttcatgatcgtcgtggcgctgattgtggcgttgaacgtgctgctgattgtcctgacgctaatgggcagggcgtaatagactccagctgaaatcctgcgatagcacaacagaagccccggtgttggaaaccggggcttcttattatgttgagaatggttggatctgccgtcagttcgcagccatacgccgcgcacgccgttcgcgcagcgaacgcagggaaataatgtctcgcgtacgaccggcaccgtcgcccttgacgccgaagaacaccataagcaccatcgcgaagcacagcagcgcggagaatcgcagcgcccactggatgccgaagatggaagccgcaacggctgagactcccgcctgatgcctccatgcggcgaacgtttccataagaattaccagcacaggtgcacccacggcgcccgcgatctgccgcgcggtgttcgtgaccgacgatccggcagacacctcatccggcccgttcaggcagttcagcgaccatgtggtaatcggcataagcaggaatcccatgccgatctggcgcgtgaactggcagatcgacacccaccaaatccatgtatccatagacaccaaagacatgccgatcgtaccgacggtcagcacaatcgagccgcacaacgccacgggccgcgcgccgaaacgatccatcgcacgaccgccaaagaattgggaaacacactggcctatggcgcccggcagcatgatcaggccgctcatggtggccgagtaaccacggtcggtctggatgtacagcggcatgatgaccagaatcgagctgaacgcaaagaacgccaaagacgccgtgatggtgccgatggtaaaggaccgattcttcaacacctcaaggtccagcagcggaggctgggggagtgcggccggctccgctcccgactgcgccgccttggcttcgcgataccgccgaccgtgacgcaggttgcgcatcacaaaccacacgatgccgaccagtcccacaaccatcggcccccacgtgaccggtgccgcaaatccataggtctccgaattggtgaagccgaacatcagcccaccaaagccaatcaccgacaggctcaccgagaaaaagtccgtgcgggcagacgggtcatgcgagccgaaattatgtagtccgaacatggccgccacgagcgagattacgccgatcacggtcatagtcagaaagatggaacgccagccgttcgcatcggtttgccagccgcccagcgtgggtcc

SEQ ID NO: 3000 - DNA, 4198 bp, Unknown
  R19_24m  MAG No. k141_12581
gatccggatgcgttcctgtgccgacaagtgggaatacactttcctcatgggcgcaacaccttctccagttagaacctgaacacttccaaccatagagcgggtgttgcgcttctatctagaacccgggttcagcccggggcaaaaccgaaaaacgtagaatgaaagggcaacgttccacctactgaaagaaggaacattatgacacttgcgtttgttgtgccgggccttgatgaagcggccagtgagaaggccatcgccatcctacagaaccgactgagccaggagcaggaggccgctctggtcctgaagcacgcacactggaacgtgaccggcccgaacttcatcgccgttcacgagatgcttgaccccgaggtcgaggccgtgctggctcaggccgacgagaccgccgagcgcatcgccactctgggcggcaccccggacggccgcgcggacgccatcgtgcgcaaccgcacgtggaagtcgttcgacgccgagggccgcgtgggcaccgaggagtatctcaaggcgctgatcgagtactatgacgcattcatcgccgacgaccgcaaggccatcgccgagctggacgagctggatgtgatcagctccaacatcatccaggaccacgtgcaggaactcgaaaagttccagtggttcatgcgctctcacctggcataagtaaaagcagtattccgtggctcccctcaaagaggggagccactttcgtctcacgtgaaatagagagtctccacatacataagttggaaaagtgtataaaactccccattttgaggttggaaaacgtagccaaaaccgcattcttatggttggaaaagtgtaaaatatgcgctataaacagttggaaaacgtgcccagcatagatgcaaggcctacaaatgactggagattctcatgctgcgaagaaaaatcgagacacagctggaagcttggagatccgcgccgaaacgcactgcactgctggtcaccggagcccgtcagattggcaaaacctatatcatcaggcactttgcccaacagcattacgaccatatcgccgagctcaatttcatcgagaaccctgacctcgttgcattattcgatcggccccgcgatgccaaaaacctactgatgaggctggaactggccgtaaatacgccattagtacccggcaaaaccctgattttctttgacgaggtccagcgttgcaaggaaatggtcaccgcaattaagttccttgtagatgatggtcggttcgattacgcgctttccggctcgctacttggagtcgagctcgaagatatacgctcggtaccggtcgggtacctgaccgagctggatatgtatccactggatttccaagagttctgctggtcgcagcatatcggcaacgacgtattcgatatgcttgccgaatgctttgccaagcaccaggaagtggatgagttcattcatcaaaggctcatggagctatactccaaatatctggtcatcggcggcatgcctgccgcagtcgactcgttcgcggcaaacggcagcgttgcggacgtgcgcactatacaagagaacataaagcgtgaatatcgccgcgatatcagccaatacgcgcgcaaagaagaccggctgcatatccgcgctatctacgatttggtgcccagcgagttaaataacccaaacaagcgctttaccttcgccaaaatcgaaaagaacatgagattccaatcggttgcttccgatttcgattggctggtcaatgcggatgtagccgtcgccgcgtacaacgtggacgaaccgtgcacaccgttggagatgagcaaggaacgtaacctcttcaaactcttttacaacgacgtgggtctgcttaccggctcgtttctcaagaaaaccgcgctcgacgtactcgacggcaaccctgatatcaactacggttcaatctatgaaaatgcggtggcccaagagctacgcgctcacggatttgacctgtactactacaacagtaagaagcttggcgagctcgatttcctcatccaagaccgcaacgatcacgtgctgccgattgaggtgaagtccggcaaatcctacaaacgccatcgcgcaatggacaacgtgctcgcccaccctgaataccatctcaatacaggctatgtgcttggcccgtgcaacgtctcagtcgaagggaatgtaacctacctgcctgtatacatggccggcatgttccataacgaatgacgggccgcacacttagtcaacaagtacatgtcggtcagatggttcggactggtcagagggcccgctctgatcagttaggtcggtctgaacggactggctgggctggtcggcctgagtagcccgtttggaccgatccggttcgcccttgctggccttcacactgcttcagctccagctgaagttcgctgatgcgccgttcgagttcgtcgatgcgccgtacttgtggcgaagtgagactgaggggagcctacaaaatgctcacaggccgagggcaccggccacggccatggcctcgtgttcgggatcggcctggccgatgtgtacgttgacgtgaatttcgtcatcgcccggctcttcgagaatgtcggactgggattgcagcatgctcggcttcatgaagtggccttggcggtgggaaaggcgttccatcacctcgtcgaatgtgccctgcatgtagacgaacaccacgccttgacggcgcagcttgtcgcggtagatcttcttcaacgccgagcaggtgaccacggcgggctcgccggcggccacgcgctcgtcgatccacgcggcgatggtgtcgagccaaggccagcggtcttcgtcggtgagcgggtgtccggcggccatcgagatggtggcgcattcggaccatgcgaacgaatccgatcaggccatcagccacatcaccggcactgaagcctgacccgtcatcgtcacagcaccacgcggcggttgaggtcgcggcgcagcgtcttccagccgggtaggtaggcggtcatgcggcgttggaatccggcgccatggccgctttcccacagatgcgtcatctcatggaccaagacgtattccaggaattgcggttccatcactcccaattgaaggttcagacggatgcggccggttcgcggcgtacacgatccccagcgcgaggccatgacccgtagcgtgatatgcgtgggctgccggccgatgaccggcccccacttggccagcagctgtggcaacgcggcgttgatcgcggccgccgcttgtcgtttgcgttcgtcggtccagatttgggagcggtcaaaatacggctggacgttcgtaccggcttggcccggcccggcgtcgccgattctcggacgactgatatcaccggttttcggacggccggcaacgtctccatcatggccgctggcaccagctacgccacgacctccgttctcgaagcctgcaccctcgttcaatgccatgatggagcgccgttgcgcctcagccatgcgctgctgctgggcgagaatccacgaatgtcgctctttgacgaaatccgcgatacgactctcgctcatccgcatcggtgcggagatttcgacgcggccgctcggcggtttgatgcgcaaatacaggtttttgatgggtttgcgcgtcaggtgcagatggatgccgtcaatgtccaacgactgcccggcggcagcggaccgaacggatttcggcgcaccggacttcggagcggtggattgacgacggcgataaggcatgcaagtcattcttacacaacggcggacaacaagcggcacacaatgccgcccctcacgaatcggcaaccggcgctgctacattcaatccgcataccaactgcccacaccggagaaggtcgcgcaggagaaggcctcgctgctcgagatcgacgacagcttccagaagatcgtcctcgtacgcgacgtggtcaaacccgtccgcgacgaacacggcatcctcacgatgagcgtctacgatttcctcctcgacccggacagcctgacgatgtgacgccggacggccggcaaatgccccggaacgcagccccccactcctcgaacaccgccttcgcggtggccgaggacaccatgacgagacagccgagcatgatggcacccagcagagggtgccgaagttcgcgatgacgtactgccacaggtccgacccgtccgtgtagccgtcgaagcgcagcgcc

SEQ ID NO: 3001 - DNA, 5305 bp, Unknown
  R19_24m  MAG No. k141_12638
acacggcatggcgatcatccgcatccgacaccgtccgccggacggacgcgccacccgcacgctgatgctcgatgcgggacggctcaccgatctgacgcgggataaggaggtgcgcccatgaacggcgcctacgacatcgacacctggggtcttgttctggcgttgggcatggtggccgtggcggccatcgtcagcgaactcatgcacatgggcatcggcaggaccctgatgtggtcggcatgccgcgccctcgtgcagctgtgcgccatgggattcatcatcagctacgtgattcgttcgaacagcgtgtggatggtgttcgctctgatgacggtcatgctggtcgcggcggtgcagatcgtgatatcccgcgcgcgcggcatccccaaaggtcttgccggaccgatcttcctgagcctggtcatcacgatgctgctcatgctggcgttggtcaccgaactcatcgtgcgcccacacccgtggtatgcgccccagctggtggtgcccctgaccggcatgctgctgggcaacaccgtttccgcgctcgctgtcgggctgagccgattctatgaaagcatggaggaacgccgcgacgaggtggatatgatgctggccttgggggcgacggcatgggagtccgcccgcccatccatcatctcgtcgattcggctgggactgctgcccaccaccgcttcgctggcctccagcggcatcgtgaccatcccgggcatgatggcgggccaggtgatagccggcggagatccgctgaacgccgccaaataccagttcgtggtcttcggtgccatcgccgcgctgaccttgctggccgacggtctgatcatggccatggtctatcgcacctgcttcactaccgacgaccaatatcagacgcctaaagcacgatagcctcagtatcgatctcaggccaagcctcaggcgatggtgaccggcgtgccttccggaatttggttgtagaaccattcggcatcggccacagtgagtcgcacgcaaccatgtgaggccggctgaccgagcttgttgccttcctcttccatatactcgccggagttcgccccggtcggcaccgagtggaagaggaacgggccgttgaatcgcacccaataatcagcacccatgccttctgcgggattgtagaagtgatcgcctctcatcccgataacatagttgccgcgcggggtcgtatcgttgagcccggtgctggcgatcatcgtgtagatggtctcaccgccggattgcacatacacttcctgcttggcgatactgactttcacgctgagatcggagtattgcgacaaatcaggctgcttgccggtgggattcgtccatcgcgcacgttgcgcttccttgtcacgctgctcctgaatcgcctggttaaagaccggtacctgctggcggtccaaggatgaggccgatgcagacactcgcgatgccgactgttgcgcggattgactcaccttctgcgcctgcccctgaacctctgcctgcccctgtgcgaccgactcaccgcggggccacacccgctgggcgtcaatcgtcgagaagacggcaagaacgcagcacaacaatgcgcataccgcaaccacaatgcgccgtacaacgtaaattcgttgacgacgaatcctcatccgtgctcgacgccgctcagtcatgtcttccttctcgttgcaaagacttttgccgtaagtattgtagccgcttttacgatacgtcgcgtaccaatatcacgcgcgctattccgctgtcactattcctattccgttgccgtccacttacgtctcagcaacatccacaggccgatgatcacggccaccacgccgagcccgatgccgaacagtcccgaggattgcgccgcgtgcgcggttccctgggattccaacagcccgtcctgcgtgaccaccagcgacagcatcgcatcgagaaggtcacgaatttgaccgacgaatcgatggggttgtgcgtcttatgcgaaatcaccataccgcgaatcgcaatcaagaagaacccgcaacttacgcagcagacggtcaatcgccttaaggaggcgttctggaagctgtatgaaaccaagccgatcgagaagatctcggtgcgtcagatcaccgaactcgcaggctacaatcacgccacgttctacctgtatttctcgtccgtgcgcgacgtgcgtgaccagatcgaagacgacctcatcgcccagcgagacctcatattgaagcagtgcatgcatgacggcacactccccagcatcgcaccgcatatgcaaatgccatcgcaatcggaagcagcgcagcagccagcggcatcaccgcaagcccagtagcgaggtcaacccacagctggcggcgcgggaaacaggtcgcgccgcccagtacacgaatccggcgagcttctaccgagtcgcgaggaagaagaaacgcgggaaggggaagatgatgctgccgtccgactgtgtggggtattcctcgcggacttgggagaacacttcggcctcgaacttcttgcggccggcgtcgtcaagcgcctgcagatacggacgcatgccggtgccgcgataccagtccataatcgcctcatgcgagggcagcgtgtgctcccgtttgaatcgcagatactgttccgaatcccgggtaaccatgctccccacgctaatcagccgttcacatatcggccgatattatctcacaattcagccaagcagggcgtcgcggcgggcgatgagcccgtcaatcgcggcctcgccttcgatgacggtgaaggtcagggacttacgttcgctggtctgcggggcgatggtgtgcaggtcgccgcgctgctcgtgccagccgcggccgtggacgctggagttcgagggttcgaggccgaccacgtagtcgcccgcacccatcgacttccattccatgaagtatgggaagaggctggcgtcgaagtcgatgacgactccaagtccgagcttgcggttgaccacggcggcgaagctgcggccgttctcgtcggcggcgagctcgtgcaggtacacgctttcggggcggttcgcctcgggtgcttggatttcgttccacggcgtggtgtcggctgcggtggtctcgtcacgcggggtggccttgcggctggggatcacgacttcggcgccttcggcgagcaacggccagccgaagttgcagtggtacatccacatcagcggctcgtcgcggaaggattcgttggtcacctcatcctcgaccgtgatcgacggctggccgtacacgctggtgatcttgcggcgcatcaccagattctcgccgaacagttcggcctcgcgcatttcgccggagacctcgagcacgtagtcgccttcggcggtccagtgggcgtcggagcccacatgctcggccggcgtggtgcggatgcggccgtgcatcgggaagctgccggccgggtacttgccgccctcaggcgtgacgtacggcgcgcagatgttctcgaagccgcaggtgaagaacaggccgcccatgatggaacgctgcgcctccagcccgttggtgtcgaactggttgcggccgttcaggcccggcttggacaggaaggtgaggttctcgccgcggtattcgaactggcagacgtcgagggcgcggtcggccatggatacgaagcgtagcgggccgttcttcacctcgatggccttgagaccgtgggcacggccctcctggtactcgatcgggcgcacgtaggcggcctgctgaaggctgcccatgtgggccaacatgtcggctcgcgtattgtgttctgtggatgtcatcgtcgtcaccgctccttgcaatcatcggcttgttgtccgtgtgcacatcatactgtaagcgttttccgcaattgtcgctatcaacaacgtatacgcatgtcgaaaagttggaccgaagaacaacgcaagcacaacgaaggctccccgaagggagccttccatcgtagcacacgttacgcgagaattcgtcgctcgcgctttacgcttccgcggcatcgtccttcagcgcacgcagcagggccttgttgcgggtttcgatgatgcgcttgccgtcctcgccctgccaagagaagaagccctgaccggtcttggcaccgaggttgccttccttgaccttttcggcgagcagcgggctcgggccggtgccgttgtccatgtcgtcgaacaggtaggtgctgatgttgtagaacacgtcgagtccgccgaggtcgatgctggcgatcgggccgaccaggttccagcggcggccgaggctgtacttcatcacgtcgtccacggtggccgcgtccgctatgccctgctggacgatgtagaacgcctcgcgcaacacggccagctgcaggcggttgcccacaaagcccagcgattccttcttgatctttgccggcttcttgccgatcttggccatgaggtcgaaggtgatgtccaccaccttcggatcggtcttttcacccggcaccacttcgaccagcggcatcaactgcgcggggttccagaagtgcgccaccacgaagcgctcggggtgccccatcaccgactgcagcgcggtggggctcaggccggaggtgttcgtggacagaatcgcgtccttgggggcggcgtgctccacttcggcccagacggacttcttgatgtcaaggttctcggccacggattcgatgacgaagtccacgtccgccacgccgctcgcatagtcggcgtaaccggtgatgcgggccagcaccgtgtccacggtgtcgccggccttgagcagtccggcttcggcgaagtcctcggcatcagaacggatcgccttcatcgccttctccagcgaggcctcgctgcggccgaccagatgcaccggatatccggccagcgcgaactgcaacgtgatcgcatggcccattgttcccgtgccgacgttcgcaatcgtcttgatatcgtccgctgtctcaatcatggagaccccttctttccggcggttcgcctggcgttggcgtacgcaggaacagcaccgtgccgttatgcgtttgctcgcattctatgccgatttcgctacgtgaacatttactgaacatttcgcggattcgactagcacaaatccctatatcagcacaaaagcccgttgtctatttagaagtgcaacatccttgttgttcggttaatgatagcagttcgtcggcgaatgcctcggccggggtgcggtagccgagcacgcgcatgggacggttgtcggtctcgtccacgatggcctgtatctcgtcggccatggacgagtcgatgcgcgtgcgcttgggcaggtagcggcggatc

SEQ ID NO: 3002 - DNA, 24201 bp, Unknown
  R19_24m  MAG No. k141_12652
ggccaaggcgttcggcttcgaccggccgaacccggtcaccggggtgcctatcggcctcatcgcccccggcttcgccgccgatttcaaccttgccgatccgaccgattggacggtcgaacaggtgtggtgcgcgggccgcaagctcaagtagcagtaggccgaccggttgacgaatggaaagcattcgtctacaagcatgttcaaatggtgacatgatagcatgttcatctcaccatttgaacgttattcacgtcgtaatacaagaatccgtaatactgctcgataccgcataaaaccggccatggtcgccacaagcgaaacataagtcgatggctgtggaaacgcaggagtaacacatcctcaccatagtcaggcggtaatccacgcccgcagtgatggcgtggaaacaagttatgagagaggattcctgttgaattccaagaagattctggccgccgccgtctccgtggccgccatcgcatccctgaccgcctgcggcggtgtgaaggatgacaccaccgcaggcgccgattccggcaacgccatcaccatcggcaccaccgataagatcaccagcctggaccccgccggctcctacgacaacggctcctacgccgtgcagatccaggtgttcccgttcctgtatgcccaggactacaacacctccgagctgagcccggacatcgccgccgatgacggtacctggaacgatgacggcaccgaattcaccgtcaagctcaaggacggcctgaagtttgccaacggcaacgacctgaccgcttccgacgtcaagttctcctacgaccgcatcaagaagatcaacgacccgaacggcccgagctccctgctcgccaacgtcgaatccgtgaccgctaaggacgacaccaccgtggtgttcaaggattccgtgcctttcgacgtgactttgaagcaggtcatgtccagccccgccggcccgatcgtcgatgaggataccttcgacgccgacaagctcaccgacgccgacaccatcgtctccaagaaggccttcgccggcccgtacacgctgaccgccttcaagatcaacgagtccgccgcctacgctaagaacgactcctacaagggcctgaccccggccaagaactccgccgtgcaggtcaagtacttcgccgacgcctccaacctgaagatggccgtccagcagggccaggtcgacgtggcctaccgctccctgagcccgaccgacatcgaggacctctccaaggactccaaggtcaaggtcgtcaaggggccgggcggtgaggagcgcttcatcgccttcaacttcaagattcagccctatggtgaatcccagcccgacgccgacgctaacaaggccaaggccgtgcgccaggccgtcgccaacctcatcgaccgcgaagagctctccaccaaggtctacaagggcacctacaccccgatgtactccttcatcccggacggcctggccggtcacgatgacacgctgaagtccgcctacggcgacggcaacggcaagccgagcaccgagaaggccaagaaggtcctcgccgatgccggcgtcaccaccccggtcgacctcaagctccagtacaacagcgaccactatggctccgcctccgccgacgagtacgcggccttgaagtcccagcttgaggaaggcggcctgttcaaggtcgacctgcagtccaccgaatggacccagtactccaaggaccgcgtggtcaccgacgattccgacggtgtgtacccggtctaccagctcggctggttcccggactactccgacccggacaactacctgtccccgttcttccgcgacggcaacttcgtgaacaacggctactccaacaaagaagtcaacgacctgatcgtcaagcaggccggcgagaaggatgcctccgcccgtgaggacatcctcaagcaggtccagaaactcgagaccgaagacctctccaccatcccgctgctgcagggtgcccaggtcgccgtcaccggcacctccgtgaagggtgtcaccctcgacgcttccttccgcttccgctacgcctccgtcaccaagggctgatccagcatgagctcccctctttgaggggggagctgtctggcgacggcagactgaggggagcccaactcgtatgactcccctcagtcggcttcgccgccagctcccctcggagaggggagcctttattgctttatataccgattaccaacaccaaggagcatcgcgtgtcagacagcgccacagcgacctccagcaccactccggcgaaagccaagacgaagaagaaccgactgtcaggtagtttcttccgcttcgtgctgacgaggttcctcctcattatccccaccgttttcattctggtcaccatcgtgttcttcgtgatgcgcgccaccggcgacccgatttccgccgccctaggcggccgcctgacacccgccgaactccagcagcgcatccacgcggccggctatgaccgcccgctgatcgtgcaatacgtcgactatcttggcggcctgctgcacggcgacctcggcacgacgctgaccgataaccagccggtgatcagcatccttacgcactacggcgccgccacattcgaactggccttcctcgccctgatcgtggcgctgatcgtcggcatcggcctgggccgactcgccgcccgcaaacgcgaccgtgccgccgacgccggcatccgcatcttcgccatcctgtgctacgccaccccggtgttcttcctcggcctcgtgctgaagctcatcttcgccgtctggctcaacatcctgccagcctccggccgctccgacctgaactccgaaatgcagttcacccgtctggtatcgccgaccggcttctacatcatcgacgccatccagctcggcgacatgaacgtgctcgtcgacgtgctgcgccacgccgtgctgccggccgtcgccctaggcctgctgaccgccggcgtgttcatccgtctggtgcgcaccaacgtcatctccacctacaattccggctacgtcgaggccgcccgctcgcgcggcgtctccgaaaagcgcctgctcaacaagcacgcctggcggccggccctgatcccgatcatcaccgtcatgggcatgcagatcgccctgatgctcgccggtgcggtcctgaccgaaaccaccttcgaatggaagggcctgggcttcatgttgtcccagtacctgaaggcccgtgacttcgtggccgtgcagggcatcgtgatccttatcgccatcatcgtggccgtcgtcaacttcctcgtcgacgtcatcgccgcgcttatcgacccgagagtgaggtactgagatgaccaccgcatcctccgacaagatcaccgtccccggtgacgaccgcctcaccaagctcaacgtcagcaccaagacgccgttctggaccaagattccaatcatcaaggaactgcgcgtggcggtcggctggcagaagggcatgctgatcaccggtctcgcgatcaccgcgttcttcctgctcgtggccctcttcgccccgctgatcgccccctacggccacgcccagatcaaggccgccgacggcacgtccttcccggcgcaggccgcgccctccgccgaacacatctggggcaccaccgccgccggattcgatgtgttctcccgtgtggtgtggggtgcccgcaccgccgtcatcgccatcgtcgtggccgtgctgctctccatcttcgccggcgtgctgcttggtttggtgtccggctactacggtggctgggtggaccgcatcctggtgatgatcgccgacgccgtctactccttcccctcgctgctgctcgccattctgatggccatcatgatctcccacggccagtccggcctgtggagcggcatcctggcctccggcatctccatcaccgtggtgtacatcccgcagtatttccgcacaattcgcgccgaagtgatccgcatcaaggaatccgcgtatgtcgagtccgcgcgcgtggtcggcgcctccacctggcgcatcatgaccaagcacctgttcaagaactccacccgcacgctgccggtgatcctgacgctgaactcgtccgaagccatcctgaccctcgccggcctgggcttcctcggcttcggcatcgagccgaccgccgccgccgaatggggctacgacctgaaccgttcggtttccgacgtgaccgccggcatctggtggaccgccgtgttcccgggcatcgccatcgtgcttatcgtgctcggcatcacgctcgtgggcgaatcgctcaacgatctggccgacccgcgtctgcgcgcccgcaagtccgccggcgaagtggtcggatcgatcgaagacacgtccgtcgacccaaacgagaagccgtccgcacgcaacgaggtgatcgccgaactcgacgcgaacgtcgacccaccggccaccgtcaccgaccatgacccgaccatcgtcgcctccgaatggaccggcgaaggcaagccggaaggcaaggagtgagagatgagcgaagacaacaagaatctcgccgatatcaaggacctgtccgtctccttcatgaccgacgccggttccatcaaggccgtcgaggacgtgaacttcaccattccgcgcaagaccgtggtcggcgtggtcggcgaatccggttccggcaagtccgtgaccgcgcgctccatcatcaagctgctgccggagacggccaccacctctggtgccgtctacctgtccaagcgcgatggctccgattcgctggacgtgctctccctgagcggcgaacagctgcgcgaagtgcgtggttccgaggccgcgatggtgttccaggagcccaattcggtgctgaacccggtgtacaccatcggctggcagattgaagagggccttcgcgcccacggcatgaaggacaagaaggaactgcgcgccaaggccatcgacatcctgaagaaggtcggcatcccggatgccgaaacccgcgtggactactacccgcaccagttctccggcggccagaagcagcgcatcgtcatcgccatggcgttggtgctgaaccccggcctgattctggccgacgagcccaccaccgccctcgacgtgaccgtgcaggccgaaattctcgacctgctgcgcctcgcccgtgacgagttcgacgcctccgtgctcatcatcacccacaacatgggcgtgatcgcggacatcgccgaccaggtggtcgtcatgtaccgcggccacgtggtcgagcagggcgacgtggagcagatcttctaccatccgaaggacgactacaccaagcgactgctgggtgccgtaccgcgcatcggtcagaagctggtcgtgcgcgaccgcgagggcaagccgatcgagcgcaaggccgattggcgcgaacagccgatcgccgttgaggccaagaacctgaccatcacgtacccgggccatctcatgcagcccgacttcaaggccgtggacggcgcgaacttcaccatccaccgctccgaagtgctgggcctggtgggcgagtccggttccggcaagtccaccaccggccgtgccatcgccggcctgcagaaggtgtccggcggctccctgaacgtgcttggcatcgagatgaacggcgtcaaggagcgtgacttcaagcccaagcgcgcggacattggtttcgtgttccaggatccgggctcctcgttcaacccgctgatgaccatcgcggagaatgtggccgagccgctgctcgtgcaccacaagtacggttccgtggccgaggccaagaactatgtgggcgacctgctggagatggtccagctgccgcgcgcctacatgaaccgtttcccgcatgagctgtccggcggccagcgccagagggcgtctttggcgcgtggtttggcgttgaagccgtcgctgctgatcgccgatgagccgacttctgcattggacgtgtcggtgcaggccaaggtgttggagctgttcaagcgactgcaggcggaaatcggcttcgcgtgcctgttcatcacccatgatttggcggtggtcgatatgctcgccgaccgcatcatggtgatgcataagggccagatcgtggagcacggcgatgccgaccagattatgcagcacccggagaacccgtacaccaagaagctgctggcctccctgcccgtgcccgacccgcgcgaacagcagcagcaccgcgcccacctccacgagctcctagcccaagaggcgtaatcgcatagcattggagctccctcgtcagagggagctaactttatatccgctagtactgctgcccatcgaactggaacagggcgtgggcgtcgccgtgctttttgttctcgatgtaagtatggaacagctccagccgctcgctcgtgctggccgccaggggagtgggcaggtcatccagatcgaaccagccgacgctgaggctttcctcgtcgcccacgaacggctcggcattgccgccgggcttcagggcgcacaggaacgaatgatccatgtacatggtgttgtcgccattggcgtaggtcagcaccttgtttgacgaggtgacggccaccaaatcggtgacgatggcatcgatgcccgtctcctccttgatttcgcgcaccaccgtgtccgccggctgttcgcccggctcgttgatgccgtagaccatcgcccattcgcccgtgtccgaacgacggcccaacagcagttgaccatgttcgttcagtacacaaccggtcacgccattgagccatagcagatcatggccgatcttcttacgcaattccaacacaaattccggagtaggcacattgcctccttagtagaaaaaaggagctccctctgatgagggagcttaagggttacttggcttgggcagcctgcttaatatggtgcgcttcgcgcatgatttcattttcctcgcgcttgtcagcgttcggcgtcgcctacaatcagtccaccggactgattgctttacggctccgcatccacgcttcgacgtcgtcgatctgcttcgggatgccggcggaaatccattcggggccgttctcggtcatgagcacgtcgtcctcgatacggatgccgatgccgcggtattccggcggaatcagcagatcatcctcgcggaagtacagaccgggctcgatggtgaagatcatgccgggcgtgatcttcgcgccctgataggactcatagcgggcctgcgcgcaatcatgcacatcaagacctaggtggtgggccacgccgcaggcgagccaacggcggtgctgctggccttgcggggacagtgactcctcgacgctcaccggcagcagaccccaatcgtgcagacgctcggcgatcacacgcatgcaggcgtggtggatgtcggaataggtggcacccggcttggcggcttcgaaaccggcctgctgcgagtccagcacggcctggtacagacgcttctggaagtcggtgaacttgccgttggtcgggaaggtgcgggtgatgtcggccgtgtacagggaatcgacctcaacgccggcatccaccagcagcatgtcgccggtcttcaccacaccggtattgcgcatccagtgcagaatcggggcgtgggggccggaggccacgatggagtcgtaaccgatggcgttgcccagctcacgggacacggcgttgaacgcgccttcgaggatacgctcggaacgcggcttgtcgagcgcggccggcagtgcggagagcagacggtcgaagccgtgcttggtggcgtccacggccttgcgcatctcgttgatttcgtagccgtctttgaccatgcgtgcctcggcggcgaactcgtgcagcttgtcgtcggatgcggagttcttgtccggatcggcgaaaccgttggcctcgcggatggactcgaccatcgaggtgatttcgggatcggtctcgctgaccacgcgcacacgcacggcgccggcctcggcacccacgtccttggacagggcgtcggccagctgggcgatgtcgtgggtctcgatgccggtcatcgcctgcatctccttgaggccagcacgcgggccaacccagtattcgccgtagtgggcggacatgaagaagtcctcggtggagttgtcggcgcgaggtgccacgaacagttccggagtgtgcgtcttgccggcggcggcttcgggggagtcggggtcgaccgggttcaggaccagcacggcgccggcctcgtaatcggaacccagaccggtgtagtaggcgaacgtggtgtccgggcggaacatgtaatcgcaatcattgttgcgcaccttcggctggccggccggaatgaccagacgctcgcccgggaaggctttgcccagcgcctcaaggcgggctggcgtgaacttggaggattcgagaggcttgatctccggatcatcgtcggcccagccggacttcataaactccttgaatgcagccgactgcgggcgcagcgagcggttgttcacacggtcgctcatcgactggttcgcgcccggcgccgtagcgcgctcctcggcctcatattccttgtccttggcggtgatcacttcacccattgccactctcctgtatgtagttgttgtcgaatcatcgattcccacttcatactagtcggctttatgcgatgtgccacgattgacggctgacggtaaaaccaagtacggaatttggacggtcttctggacatgcccatatggcgagtgcatcgggctggaatgcgggcccgtttattgttctcggtagggaaggaggggcatgggctggagcttgccgattgatattggcatattttgcgggctgaatccatgtgaacccatgcgatgaaggttcatcgcatcacgggacccgctgctctgcggatgcctccatctggggcactctggctttgagcagttttacccgcagcggagtgcgttcgatgacgtcggcgtatgtgaaatggacgatttcggtggcaccggctcgtttcagtccctcgtcgcgtgctcgttccttggccaccacctcctgaatgctgcggttatcggtcatggctgggtccacgtatttttgtgtgccgtcgtattcggccactatcacgcgcccgtcatcgagcttccatacgaaatcaacgcggtgctcggtattcgtctgcgggtcggtcaccgttacctgaatacgcggcgtgaggaagcgatcctcgatgatggtgcctcgcgcgagggattctccaccattctcgctcctttcgtttgcatagcgcagcaggcggaatactcgggcataatcgattctccattgaacgcagtcggcggctatctcttccttggttattcccttggcaagggccgagtcaaagatcggcaacgcaaaccgaaaatcaaggtctatagcggcctcgaccaaggttctagccggtgatatcagggataggccggaggcctcgtaatgtgtcttcggattgttcatatcgggcatatagacatgtcgtaagcgctgatggcattgacgagatccatgatcggaagtcacgatggttatgcagccatcatgcaaatgccattgatgttcgaatccataagcacttactgccaccaagccgccaaaaacccactgaggatgctcttgcgcaagagcgcgggccatatgcaacgttcgctccggcggcgtcaaaccatcccagtatgcggtatttgcataaagactgggaatgccgtcatacactttcaacaactcgccactctgggcacggcggcgtagagcggtctgttccgcttcatttcttgaatagacgcatctcagctcattctgcgcggctgatatgagcgaggccactgctttgtgtgtcttcatgacgtcgagcgtagccggaacgaagcagcgtaagtatgaatttcagccattgtggttctagcctcggagcttggctgtcttggagtgagatattcccgataatttcaaggtattaggccgctaattcggaatagtggataacatacaaaacttatccaccatcagtaatgtcattcgaacaacgtgctttggggattcgaacaagatatcatcggcgaagacggatgtagctggtagagggcggcgaattgacggttaacggtgcttatgctttgtacgccgtcggtgctggttcagatattggctggcttctgtctgagtgtggaatctagcgtcggcgtgagtccaatggttgtatcgtggccgacgatttgctgcgatttattggcggcatagatccagggcttggacggctgccgacggtgagagcagtcataacagtgaatgagcctctgcgagttcaaaagatgatgtagaggacgtttgtgagagtcgtttccggggcaagacatggtcgattgacgatgttgaaatttctcagcgacggcagaatggcatgccttggcgaggaggcgacactgagaggcgatggagtcgggattaatccaggttttggccagctaccgactcgcaagagcatcatagcgtcggtgtaccgccagaagctggcactgtaccgacgctgaatagcatcagcgtcgccggacatacaagttttggattgcagccgactaagaatgggaagccgacggcaagagccgcattgcaactatatgagatggcttcactgtgcgcgctgcaggaaaaggccgcccgcgcggcggcgacatatgagacggtttcactgtgcgcgcacgataaaccaccccggcggctaggatagagggaattgagggagtgcggctccacgcgtgaaggcaagaatcccgaaccatgcagggcaaacctgtgcgaggggagcttcctgcgcatgcggaagcggaatatacgcgggcatgcgtagacatgacgagaatggcacgaacacgtaagtggcatacgcactccgaacgattcaacagcaacacgagcagaggtcagaagaggatatgtcattcgagcatccgaatcggaacaacgagagcatgcgggacgtcgaactggacatcatgagccgcccgccggagcataacaccaccaatctggatctcgaccggatgaacctgatgctcgacatcctgggccacccggagcagtcgttccgcgtgattcatatcaccggcaccaacggcaaaggctccaccgcacgcatggccgaggccatctgccgcgcctacggtatgcgcaccggcctgtacacttcgccgcatctggagaagatcaacgagcgtatcgccatcgacggccagcagctgtccgacgacgatttcatcgacatctgggaccagaccaaggatctcgtggccctggtggacgccaagatggaggagcaaggcaagccgaagatgagcttcttcgaggtgctcaccgccatggccatctggaagttcgccgacacgcccgtggacgtggccatcgtcgaggtcggcatgggaggcctgtgggacgccaccaacgtgctcaacgcggatgcggccatcatcggcccggtggacatggaccacatgcagtggctgggcgacaccgtcgaacagatcgccaccgagaaggccggcatcatcaagccgaactgcaccgccatcatcgggcctcagccgcatgaggaagccgtcatgccgattctcaccgaagccgccgaacgcaaccacgccatgctcgtgcgcgacggctacgaaatgaccgtgtccgaccgtatggccgcagtcggcggccaggtcgccaccctgaccacgcccaacggcacttacgagggcgtgccgatcgccaagttcggcgagcatcaggcccacaacgcgcttgccgcgcttgccgcctctgaagtggtgattccggtcaatggcccgctggacggcgacttggtgggcgaggcgttgagctcggtcaagattcccggacgcatcgaacagatccgcacctcaccgaccatcattctggatggcggacacaacgtgaatgccgccgaagccctacgcaaggccatagaggaaagctacgacttcaagcagctggtcggcgtggtcgccatgatgcgcgacaagcaggtcgaggaatatctgggtgttctggagccgatcctgagctccgtggtggtcaccgagaactcgtggcgcgagcgtgtgatgccggccgatgagcttgagaagattgccgtggacgtgttcggccgtgaccgtgtgatcaaggaagcgaacctgcccgacgcgattcaggctgccgtcaacatggtcgatgccgaagacgagttgggcgtgggctacggccacggcgtgcttatctgcggcagcttcgtcaccgccggcgacgcacgcctgatgcttgaggagcatgccagccccacgatgaggcaggccatggccgtccatcagccggcggtcgacctggacgattcggatcggccggcagacaaggccgaggatgaggccgccgacaacctcgaggattcggtgagcccggacgacttcgacgtgttcgacgtcctcggcctcggcaaggaacaggccagtgacgccggtaacgccggcaccggcacggccagcgccgacacaggcgccgtcaccgacgattccgccgacgtccggtaacccgcatccaaggcacatcggatacccggacgcccgacatacggaaaacagtctcacgccatgtatctcaaggaactcaccctccgcggattcaaatccttcgcctccgccaccacgctgcgcttcgagcccggcatcacggcggtcgtcggccccaatggttcgggcaagtcgaacatcgtcgacgccctgacctgggtgatgggtgagcaaggtgccaaaaacctgcgcggcacttcgatggaggacgtgattttcgcgggcacgtcctcccgcccgccattgggccgtgcacaggtgagcctgaccatcgataattccgatcacacgctcgatatcgattacacggaagtcaccatatcccgcaccatcttccgcaacggaggctccgaatacgcgatcaacggctcgcaatgccgtctgctcgacattcaggaactcctctccgataccggtcttggccagcagatgcacgtgattgtgggtcagggacgattggatgcgattctgaaggccgacccgtccggtcaccgcgcgttcatcgaagaggccgccggcatcctgaagcaccgcaagcgcaaggaacgcgcgttgcgcaagttggccaataccgaaacgaacctgagtcgacttgacgatttgctgggggagattcaccgccagcttggccccctcggacgccaggcacgtatctcccggcgcgccgacgcgattcagatatccgtacgcgacgcccaagcacgcctgtatgccgaagacgcccaacgctcgatgagccgccgcgacacggtacgtcaagagcttggcgatgtgcgtaaccagctggccgtcgcccagcgtgaactcgcccaagtcaaagtacgcatcgaacaggtcgaggcgttgagctctgaatccagtccgaccatcgccaaggccaaccaatactggcatgaattctcacagacccgtgaacgactgaacgcgctcgcccagttggccgaagagcgcagccggtcactcaccggccagatcgtcaccaacttcggtgaggatcccggcatgctcgtcaaacgagccgaggaactggagtctcaggccgcggcacaaaccaaggccgtggccgatgcacgcatcgcactcgacaaggccaccgaggaacgcgccgacgacgagaagaagcttgcctcagtccgccagacattgactgaactgcgcaaaaccgcacaggagcgcgatgcgcagatcgcccgactgcgcgaactcatcgcccgcgaggaatccgccgtacaactggcgaccagccgcgccaaggattatgactcccaacgcgacttgctgacttcccagcgcgacgatgcccggcaacagctggacgcattgcgcagcgaagtggactccattgccgacgatgacggtgccgcattggacgccgcgcgtgcgacactcgccgaatgccgcgaacgactgaacgaactcgccgataagcagcgcgagatacagtccaagatcatctcgctcaaatccaaggccgatgcgcttgccgacacgctaggcagccgcaatgcctccggatcattggaacgcgacacggacgtggcctcgcttggccgactcaccgacttcatccatgtggccgaaggctgggaagaagccgtggcccacgcgctcgaccagtatgccagcgccatcgtggtacccgaggcaggcaacatgttgcacgccctcgaacgcgctcgggaagataagctcggcaaagccgtggtgctgaccgcgagcattgccggcgatcccgccacagagccgggcacggagtcggaggagagtagcgccgagaacacggcggccgccccgcgatcgggcagcgcgctggcagcactcgtcaccgcgaacccggatgccgagaaccaagcgcaggctgaagcggtcgtgcacaccgtgcgtctcctgctggctgatgtaacagtggccggcaccgccgacgaagcccagcagattgtggcatccggcgaagccatgcgggccgtcaccaagaacggcgagaccttcacacacggcgtggcggcggtcggcggctcttccatctctcaatcggacctgtctctggccgcccgtcgagacaaggcattggcacaggtcaaacagttggccgcccaagacggcggaatggctgagcaagtggccgaggccaaagccaaacgcgatgaagcggcccgactcgtcgaccaggaatccgccaaacgcaccgaagcccggctcaaagcccaacaggcggagaaatctctgaaatccgccacagaccgcgtcgcatcgttcacccgtcagcttgagcagctggataggaaaatcaccgagacccaagagaatcgcaacgagcatcagcgcaagctcgacgatctcaatcgcgctttggcatcggcccggcaatccaccgccgaacatgccgatttcgacgaacttgatgaacgcgaacgtacgctggagcgcggactgaacctgactcgcgagcatgaggtcgccgcgaaaatcgcgtggaccgaagcaagccgcaaaggggagtccctgagccgacaggccgggctgctgcgggacaacgccaaagaagccgccgaacgccgcgcccgcatcgaggcgttgaacgatcgcagacgcgagcaggccgcacacctgcaaggcgtggccgatgacgcgcgagcagtggccgccatggtagagcatacgctgcatgacgtggccgccaaacgagacgagctgcaggccgccgcctccagccatgacgaggaactcaaggccctgcgcgcgcagcgcaaccagatcgagcccaaggtcaccgatctgaccgggcgcgaacatgccttggatgtaaaccgcgaacggttggccgccgaatccgggcagctcatgcagaaagtgtccgacgaactcggtctcactttggaggaattggttagtgattacggccccgaacagccggtgcccgtgctggatgatgagggcaaccctgtgccgttggatgagacggaagctgaggctgggaccgaagagggagaaaccgggggagagaccggcaccaacggcgattccgcccgctttaagaccgtgccgtataaccgtcaggagcagaagaagcgtctcgataaggctcgccgcgatctggccgcactcggtaagatcaaccctttggccaccgaggaattcgaagcgcttgaggagcggaacaagtatctcaatgatcagcgcaacgatgtggtcaaatcacgtgacgatttgatgcagctcatcaaggatctcgattccacgatggtccaggtgttcaaatccgcgttcgacgataccgccgaggcattcgagcagatgttcgccacgctgttcccaggcggcaccggacgactgcgcctggaaaacccggaagacatgctcaccaccggcgtactggtcgaggccagcccggccggcaagcgcgtcaaacagctgagcctcctgtccggcggcgaacgttcgctgaccgcgctggcgctgctgttcgcgattttcaccgcccgccccagcccgttctatgtgatggacgaggtcgaggccgcgttggacgacgtgaacctgacccgtttgattaatgcgttcaatgagctacgcgcccatgcgcagctcatcatcattacgcaccagcaacgcaccatgtcgattgccgacgcgctttacggcgtaaccatgagagccgacggcgtaacagccgtggtgagtcaaaaactcgaacgataaacgaatggttcccgctggcaggaactggtaccacaggtgacagagggcggtccatatcgaaagaccgccctcagtctcgcttcgttcgacagctcccgccagcgggagcggggcggtattagcgcaatgccttgcgcacgccctgtacagtctgcagcgtcttgtagaagaccttcttgatgggtacgtcgcgggcgggggccaccggggtgatttcctcggtgaacttgcacttgaactcgttaaggcccttgagagacggcgcgaaatcggagccaatgcccatgagatcgtattcagtaataccctgcgagcctaggatgcagcattcggaatacagcagcttgtcggtcacatgcagacgcataacctcgttgcgcatgccggcatagtagcgcaccgcatgcgtgccgttcacggtgacaatcgaccatgccaccacacggtcttcaatacgtgcggcgaacacacggcaatgatcggcacccaacgcgccgatcatatcggagtagtcgctcatcggagcaggcgtgaatccatcgcgctggccggtttcgaccatcacatcgtaatattcggagaaatcggccagcgccttatccgtctcatcggcaacctcggccgggcattcacgtagagacttgcgcacgtcacggcgtccacgacgcttcatccgagccagaatctcatcatcgccaccagtgacgtcgatgaccacggtctggtcgtacggcactgtggacagcaccttctccgtaccatcggcgaaccaggtgtcgatacgcaggaacgcgatgctcttgtcggccttcttgacggtgtccacgatggcgtcgacgacctcgcgctcctcagcctcggtgggcttggcgacccacgccggcccatgcatcgagcgcagataatgataaccgtgcgtctcaaaatcgataaaggagatcacggcgaccaattcaccatcacgcttgatcagataatcgccccatggcgtgcgtccgtcgatatccgcctgaaaaccagaccaaaccttggtctgttcgataggcaacgtgatgccggccttctcggcttcggcttccagtgtggctccgtcaactttctccaacgtgatcattacgattcagctatcctttttcgttcgtatccgtatgtcgtgtttctggtttggtcgtattgcgcgtgatctgatgtgggccaatcgggatccgatcaggatctgattgaccggaatcccgtcacaagccaaacatgcgttcgacgacgtgatcgtcgccgtcgaacggcacatgcttgtgatggtccttgatccaacgctcgttgcccttgccgatgatcagcaggatgttgaatcggtcggcgtgcgcacgggcatcgtaaatggcgttggtgatggccgtcggacggtcggaaatcaccgtggaggccacatccttgttcgtgatgtagccttgcatttccatgcagatgtcgatgaacggctcggtgtccgtatcttcggcggtgaaaatgaagttcgcgatacggttctcggcagcctcgacgatttccttacgacgatcgtaggccttgttgccggccgatccggtcaccagcgtgatacgcgggttttcctcgccccaacgctcgtagacgaagtcaagcagcgcggtgacggatgcgtagttgtgcgcataatcgacgatggcgagcgtgttcgactgcggatcgcggaactgttccatacggccggcgatacgtacggattcgatggcgtgcagtgcgccggcgtcatcgagcgatacgccagccgcatgggcgatggcgatggccgccgccgcattgaggtagttgaagtcgccatcgatggacagatggtagtcgccaagggcctgatctccgtcggcgatgtggaaggaggcgtgctccgggtcggcgggccaggcgacgacgtccgcattggtgccggcattatccgcgtcatgcagggcgaaggtggtcacgccgatgccggctgccgccgcgtcctcccgcaacagatcggcgtgcagactgtccgcgccgagtaccagcgacttcgcgttggcgatgatctggcgcttgcaatacaggtaatcctcgaacgtggggtgttcgatcgggctgatgtggtcgggggagatgttgaggaacgcggccacatcgaaagtcagtccgtagacgcggtccaccttgtacgcctgggaggagacctccatcaccagatacttcatgccgttatcggccgcctcgcgcatcatgcggaaggcgtccatcgattcgggcgtggtcagatcggattcgacgtaggtgtggccgtcaaggcaattatcgaccgaggagaacaatgcggccttgccgccggagacggcgttgataagcgcctgcgtgaagtacgaggtggtcgtcttgcccttggtgccggtgacgccgatgaccgtgagctcgttctgcggatatccgtagaacgcggcggacagcaggctcatcgccttacgtgcgtcgttgacgatcaggccgggggtggcggttgcggctgagtactcggtttcggccacgtatgcggccaggccggcttcgtcgatgccgttcagatactcggccttgaatcggcccttgcagcacagcagggtgccctgcgtgaccttgcgggtgtcgtaggtgatgccggcgaacggttcatccgccgaagcgatacgggccgggtcgtcggtccagacatccccttggatgatttcacgcagcagatggtgttccttgagcaggtcagcggccgaagccaaagtcaaagccataattgttactccctattatctagccgatacgccattctacaggtggggtgcagcgtgttgtgactcatacgtcatcgaccacgatatgggcacatgatttgattagaatggtgaaccgtgacgacaagcgaagcaactacgcaatcctggcagtcagccggatcgggcgagtccatggcagccaagcgcgccagattcgagcagctcgccatgcccgccgtcaatgcactgtaccggcaggcgatgaggctgaccaacaatcccgatgacgcgcaggatctggtccaggacaccttcgaacgcgggttcaaggccttcgactcattccagccgggctccaacttcgaggcgtggatgaccaccatcgagcgcaatgcctacttcaaccagtatgccaaggccaagcggcgcccgcagcgtgccaacgactccaccggcgaatacgacgattgggacatttacgatgccgccgaacatacgtcggacgggctcaagtccgctgaagaggaatatttggacgccttcgcgcccgaggaaatcatggccgcgctcgccaaactctcgccggaacgccggcaggtgttcatcgacgccgccatcgacggcaagtcctaccaacaggtggccgatgagcagggcgtgaaaatcggcacggtgatgagccgcctgaatcgcgcccgcacgcaactcaagcgtgagctcgcctcgtatgcgaaagagcgcgggtatgcgactggttcgtcggctggttcaccatccgcgaagttgggcgaaaacgttggtcgaatcgccgattccggccataatgaaagtagtgaacgaactgttggcagcaatggcgacacgcaagccgtagtgagacatagtcatgcgactcacgcccacacgccacaacggtcaagcaagctttcgggaaaggagatctgatgaacgatcagccggtagagcgtactcgccatatctccataacccgtacggcggccgatggcacggtaagccagaccgaagtgcatatcacggcggtgcatcatcgttcagtagataccggctcggccgctgcgtcggtccagacagacgtgcatatcgttacggagggcgactgttttgacccccgtacctgctgcgacgagcgtgaacaggcgttgattgccgcgttgcgtgcctacttgcgcccggatgtggcgcccgaatgtctgatggcccggctcaaggccacgcttgatcactgctgcggcgaagataagtaacgacatatacaacaaggcccgtctgatgtatcatcagacgggccttgagcgttctataagaaacgcgaagaatcaggcgttaggacgcttgccgtggttggcggccttcttacgacgatccttgcgcttacgtccgcgcatgcccatgatggactcctttgctgcagtaaaaaaataagccttcggaattatgccacataagtacgacgtgatgcaacacgggtgtccatgtggcgatgatcgtcaggcttggttattcggtttttcagatttgttcggcgtggaaggtgaccacggtggtgtagtcatcgcccggctcgagcacaaccagatccttgccggtgcggaaggcgtcggcgtaggcggtcatcggttcgacggccacgccggcctgacgagccttcccgccgatttcgttgccggtgcacacctgccaggagttgatggtcttgtcgccggtcagcgtgaccttgatgccgtcggggcgggtgaacacggcggaagtgctgccgtcttcgccgcggttggtgatatcggtccaggcatcgtcgaagccacgtccctccagcgtggggttatcgcgcaggtcgaagatgccggaaaccggctcttcgccggtgggcagcaggtgttcgtctacggtcacgtgggtatcgcagtgcagctcaagacggcaggactcgttgtcggcggtaatggcctgaccggtggcgtgcttgccgttggccagccacgggtggatgccaaatgcccatggggccttcacgctgtcgttgttgtgcacggtgaaggtttccgtgagaccgttctcgtcaagtgcataagtggcggtgatggtgatatcaaacgggtagccggcgatgtcgggggagcgccaggagagcgtcacgtgtgattcctgcaaatcaacgagctcccacatgtagcggtaggcatagccgtgcagggaggattggcggtcgaactcgtcgatcggcatctggtagtcttcgccatcgaaagaatactgaccattggtcacgcggttcgggtacggtgccagcacccagccgttgcagcaggggatgaccttgttcgggtcgaaggggacgatgaggtcttcgccgcgccacttcagctcgcgcaggctggcacccagttcggtgacgacggcactccattcgccggacgagatgacatattggttaccagtgcgaggcttcaaagccatagtgcacactcctttgtgaaacagattgttaccgctcacaatcgtatcgcacaagtcccaagacgcggcggcacataaggataaaaaattggctcccctctggaggggagccagcgtaacggaactacttctggactacttcgtagcggaccacagtggtgtagtcgccattgggggcgagcgtcaccaagtggtcaccagtgcggaaggcattggccggggcggtcatcggttcgacggcgataccatacggatgctcggcgaacggcgcgccagtggcggtgtagcactgccaagcattgatcgtctcatcgccaatgagcttcacttcaataccgtccgggcgggtgaatgtggtggtggtcgtaccatcggcggcacgctccacgtcgacccaggcatcatcaaaggcgcggccttcgagcgtcgggccatcgttcaggtcgtagatgccggtaaccggttcggtgccggtgggaatcagcgcctcgttcaccgtcacatgactggcggccttgatctgcaggtggcaggcggcggagtcggcgtcacgttcggcgacagtcgcgccctgcttgccgttggccagccacggatgcaggccgagagcccacggtgccggctcgtcgccatcattgcgggcattgacggtcacggtcatgccgttgttgccgagttcgtatgtgacggtcacggtcacatcgaacgggtatccgtccaggttggggaagcgcagtgaaagcgtcacggcgctatcggtcaacgattcaagcttccacatgtagtggtaggcgtatccgtggttcgcgttgttgcgcggtgcgggatgatattcgttgaccggcgcgcagtaatgcttgccattgaaatcgtattcgccgttttcgatgcggttcggccaaggggccagcacgtagccattgcaggtgggggtcaggtcgttgacgccgaacgggcagaaaatttccttgccttgataatcgaatcggcgaatcttggcgccgagttcgcagatgacggcggaataatcgccatagtgaatcgaatactgatttccggtgcgtggtgttttactcgtcatggaatcactcccgtagtgaggttggtgggccggtagctcctgctatcgctggccccagtctagcgcgtctcctctatcgaggcggggattggcgatagccggcatataataaacaattcgtacagacacggtagcaatacgtggagtgacgagtctcacaccatcatgcgagaagcacgtggattccttggaaaccggtgattcgtgggagacgcggaaaagttgtgacggcagattcctgtaatccctgctttacactggaaaaacactattgacgttcaggaggttccgatgaccaaaagcgttgtgctcgctgatccgcgaggcttctgcgcgggtgtggaccgtgcgattcttaccgtacagaccattctcaaagccgcggaggcttccggaaagcggacgcgcgaggatgggctgcccccggtatatgtgcgccggcagatcgtgcacaacaagcatgtggtcgaggatttggccgggcaaggcgcggtgttcgtccaggaattggcggagattccggatgctgctgcccaagcgggtattccggtggtgttttccgcccatggcgtatctccggtagtgaaggcggaagccgaacgtcgtggcatgcatgtggtggatgccacctgccctctggtgggtaaggtgcaccgtgaggtgctgcgtttcgtgcgcgaggggtatgaaatcgtctatatcgggcacaagggccacgatgaagcggtcggcgtggtgggggagaaccccgaacatgtgcacttgatcgagcatgaatcggatgtcgattcgttggattttgcgcccgacaccaagctggtgctgctctcgcagaccacgttgagcgtggatgagaccgccggcaccattgccgcgctgaaggccaagttcccgtggattcaagagccgccgagttcggatatctgctatgccacgtcgaatcgtcaggctgcggtcaaactggtggcccagcagtccgattgcgtggtgattgtcggatcggccaactcctcgaattccgtgcgactgatggaggtggcgcaggagggcttggggaagcgcggcaaagcgtatcgcgtggatgatgccagcgagcttgatccggcgtggttcgtcggactggagtccgtgggggtctcctcaggtgcctccgtgccggacgaactggtgtccggtgtgattgacgctctgcaaaacttgggtttcaccggtatgaagtccgtcgaaaccatcaaggaaaacatgcacttcgtgctgccggcggagttgcgcaggaagaagtagtcatacttggctcccctcacagaggggagccaaggatgactaccacgtgccgattggtgcggcaacggcgttcaagaccttgagcaggtcctgtggattcacgcctacggacaggcctcgcttgccgccggagaccagaatctggtcgaattgcatggcgctttcatccaacacagtcttatgacgtgtcttctggcccaacggcgagatgccacctaccacatagccggattcgcgcattgccaccttgggatcggccatagaggccttcttggcacctacagccgcagccagggccttcaaatccatatgtccgctgaccggtaccacgcccac

SEQ ID NO: 3003 - DNA, 7834 bp, Unknown
  R19_24m  MAG No. k141_12910
ccaccgcacagctcaaccgtctggtcgatgaagtggtgccgcaagcccaccgcccggcgggcaatcccgccaaacgcgtcttccaggcgttgcgcattgaagtcaacggcgaattggacaagctcgcctccacattgccgcaagccgcgaaccgactgcatgtcgggggacgactggtggtggagtcctatcattcgctcgaagacaaaaccgtcaaatcgttcatggcacaagggctgcgagtggatgttccggctggcctgcctgtcataccgccggatgcccaaccgtttttcacggatctcacgcgaggtgccatcaaggccgacgaacatgaaatcgcagccaacccgagatcggcttcggtgcggttgcgggcggtggaagtcagccgtgatattccgtcacgatggaggaaacgctttacgcaaaccgcgcagggcctgaatgacatcaagatacaaggctccgcgtctccgggcagagccaaaaacatagcacgaattcgtacaaggaggggataacagcatatggcaaccgcacgtaacattcgattgaacgcggctccggcctcgaaccggccgcacaccaagcatcagtcctcctcccgacctgagctgcgggtagtctccaacccgcgtggagacgagcggggcaatgtcgtcggacgggtcatcgaatggaccagaacaagaagcgcaccgctggtgcacgtggccatcgcagtgatcttcctcgtcggcaccttgttcggtgcgctgatgttgcgtacccagatggtgcagaactcgtttgaggcggcacagatcgaaaccaatatcaacagacttacccaagatgtcgaagacgatcaggccaaactcgatcaattagtcgcgaacctgcccgacaaggccagcgacatgggcatggtcccgcagcagggatcagtgtccatcgacttaagcggataccagtccaacaaaggcggaacccagtgaacaccattcgtcgcatcgtagagttcgccaaggtcaagaccttcgcgttcaaatgcattgccatcggcgccgcattggcgttggtggcgtcggcatgcgtgatccagctggcctccacccagctcatcggcggccgtcaaaccgcacaagcggccacggctaaccgcaccctgaccgtgacgttgagcgccaagcgtgggcgtatcctcgacgccaacggctccgtgctcgctcaaagcgtggagcgttatactatcgtcgccaatccggaggctgcacaggagttcgagccgattacttgcaatgacaacacccgtgattactgccacgaaattgacggcaaacccgtgggcgctaccggagcgtcggccgtgggccgactgctggccaaagtcttggatatgaacgccatggaactgggagctgatctgtccggtaccgggcagtatgtgattctgaagaaagacgtgaccccacaggtcaagcgcagcatcgaggcgttgcacctgggcggtattgtctggggtgagctgagcagtgaacgactgtatgcggatggcgatctcatgggcgcgctgcttggcggcgtgaacgacaacggcgatggcgtcgccggcatcgagcaggtcgagaacaagacgcttaccggaaccgatggccatgaaacctaccagcgtggtaatggcggcgaagagattcccggcaccatgaccgaatcggtggcggccaaaaatggcgacgatgtcaccctgaccattgaccgtgatgtgcaatggtatgtcaaaaaggccttgaaggaggccgagtccaagtatggtgcagcgtgggcgatcgccgtggtgcaggatgtccagagcggggagattctcgcactggccgatagcgatgaagtacaggctggtaccgttgcggcgaagatgagcccgtctcgggccgtgtccgaaaccttcgagcctggttcggtgggcaaggtcatctccatgtccggctatctgcagacgggactgcataagatgagcgatcaattgtcggtcccggaccacatcacacagaagggccagacctacaaggactcattcgaccatggcactgagcgctggacgctcgccggtattctgcagaactcatcgaacgtcggcatgattatggccggggagaactatccggatgagcaacgctacgagtacctgaccaaattcggcatcggacaaccgaccggactgaacctgcccggtgaatcgagcggtctgctcaccagcagcccttcggcatgggatctgcgtacgcgcaacaccatcctgtttggtcagggctacaccgtcaacgccctgcagctcaacaacgtggtagccaccatcgcgaacaagggcgtcaagcagcagcagtcgatcatcagatcaaccaccgatgccaatggcaagaccactgagaccaagaagggcgaagccacccgcgtggtggatgaaaaggtcgcatcggacatgatgaatgcgatggaatcagtggcggagagctacaacaagttcatcaaggtcgatggttaccgcatggccgccaagtccggtaccgcagaggtgcagggttcggatggcgcgctctcgtccattctctccgattattccgtggtgattcccgcggacaacccgcgctatgcggtcaccgtggtgctgaaggatccgaatggtgtgttcggcggtctgacggccggccctgtttccgcacagatttgtgagttccttatgcagaaatacgaggtgcctgtctccagtccacgaaaaaatgctattccagtcacgtggtaaggatcaggggagaaaggcgatagcccatgagtgcagtgagcgaatccatcgcccagcgggtgaccttgggaatgctggtcgaacggtacggttttgaagtcgatccacccttcgccaccaatgtcaccattacctcactcagcgatgccgtggataccgtgattcccggctcgctgttcatctgcacgcatgagcaggaacccgatgtactgcatgccgcacaggcaggtgcctatgcggcgttgctgccacgcgcgtccaaagggcagatcgccaatgccgatataccgttgctctacggcgatttcgacgatcgcgtactcggcgatctggccagcggcctggccggcggaccatccaacgccatggcggtgttcgcggtgaccggtgcggatgagcaggccgttgacgcaggcgtgtcccagctctccgaattcctgcacatgctgggcaatccggtggcggtaatcaccgcatccgggtccacgtcgatgacacgtaccatgaacctgaactatcctctgggcatcctcgatatgcagcgcgcgctgtccgtgtgcgccgaagacggtgtggcggccgtgatcatcgccatggatgaccgcacattggccgagcatgcgttggaatcggtgaacgtggatgtgctgggcacggaagatgtcaacgcaagcgcaagcttgaacgaattgaagacacgctacgcattcgttgcggaacatgacatgtccatgacctcgtcgacacccgaatcggatgaaatggctgcggattcaccggcaatgtacgaccgcgtccgactcgggcacatgtccttggccatcgccatggtactggccgccggcgtgaggaaaaacaacatacgcagtgccctgcatgtggccaacaatctcaattaagtccgtggatgcgggacgaagcgtaatcgtaaaggagtttgaaacaccatggttccgatgagtgtggaggagatcgccaaggccgtcgatggtcgattgatcggagacgccgattccgagtctcgagccaccaatacggtcagcgactcgcggcaggccggccccggatcggtgtttgtggccatccgaggcgagcgtgtcgatgggcatgactttgtggcgaaaaccgctgaacagggagccacggtggccatcgtcgaccatgaggtggagtccgatggcctgccgcagatcgtagtgaaagacacggtcgacgcccttggcgagctcgcccgacacaacatcgttcgccgccgcgagctggacggcgacttcgacatcatcggattgaccggttcggtgggcaagaccaccaccaaggatctgctctcctccctgcttgccaccgtaggcccgaccgtggctccggtgggatcgttcaacaatgagatcggcctgccgctcactgcgttgcgggtcgatgagcacacccggttcttcgtggctgagatgggtgccagccatatcggcgaaatcgcgcgactgacccgtatcgcaccgccgaacacggcaatcgtattgaaggtcggcgtcgctcaccttggagaattcggctcccgcgaacgcatcgcacaggcaaaaagcgaaatcgtgcagggactgcttcccggaggcaccgcggtactgaacgccgatgacgaacacgtggttcccatggccggcctggccagcggcgatgtgctgtggttcggcttggggtcgtcgcaggagcccgaggtacgggccattgatgtcactgccgaccggtccgatcatgctgaattcacgttggtcgatgcggacggcaaccatacgccggtgcatctgggcattcctggacgtcacaacgtgatgaacgcgttggccgccgcaaccgtggcgatgcgttacggtatggcacccgaaacggtggcgcggattctggcctcgcagcacaccatcagccctcatcgcatggcattgtccacggtgaatcgcgaggggacttccttcacactgatcgatgattccttcaatgccaatcccgactccatgaaagccggcctgaacgggttgaaggcttggaactcaaatgacggcaaggagccgttccgcgtggcgctgctgggtgccatgctggaactcggcgccgatgaaacggcattgcacacctcgatcggcacgtatgcggccgaattgggcatcaacgcgatcatcgcggtcggttccgcccaagaccagcatctcgatgcactggcacaggctctggcggacggtgcccgtcagagcccatccgcgtcggtggattgcgtacacgacatcgatgcggccgaacagctggtcatcgacttggcgcgcaaccattccgacgctgtggtactgctcaagggatcgcacgcgtcaggcctgagcgctttggctgaacgctgggcaaagaactgacccgataaccaccccaagaaaccgacaagaaagagaagctgcacgtgattgctctgatcattggaatgctggtgtcgctcatcgtcaccctggtcggcaccccgctgctgattcggctggtccacaagctgcactatggccagtacatccgccaggatgggccgcagtcgcatctggtcaagcgcggcacccccacgttgggcggcgtggtcatcaacttcgcgattctgctcggttgggcatcctccgcactgtaccgatacctgcgttcggacgacgtgccctcctggtccgcggtgctcgtactgttcgccatgctgtcgatgggtctgctgggctttatcgacgacttcgccaaggtgcgtaagaagcagaacgaaggcctatcggtgaccggcaagttcattggccagttcatcttcgccaccatctacgcggtgctggcgctgctgattcccaccaaatcgggtttccccagtgcgcaggcgggcatcagcttcatcgaacggccgttcttcaacttcgacttcgccggtcgaaccgtggccatcatcctgttcgtcatctgggtgaacttcctgatgaccgcatggaccaacgcagtgaatctgacggatgggcttgacggtctggcggcaggttcgtcgatgatcgccttcaccggttttggcatcatcgcattctgggaaagctaccacatcaagggcggcagccatggcggatattcctatgccgtgtccgatcctctcgatctgaccgtcatcgccgtatgcgcggccgtcgcctgcttcggcttcctgtggtacaactcgaaccccgcatcgattttcatgggtgataccgggtccctggccttgggcggcctgttcgcagccctgtccatcgccacgcacaccgaattcctggcggtggttctgggtggactgtacgtcatggaagccatgagcgacgtcatccaggtcgggtacttcaagatgacccacaaacgtgtattcaagatggcaccgatccaccatcatttcgaactgaagggttggaccgaaaccaaggtggtggtgcggttctggatgatcgaactcatcttcgtgctgctcgccctgacgattttctacggcgactgggtcacccgctccggcctgctgttcagctagcggaaatctgggtggattatgctcacccacggaattcctatatcaggaggaacaatgcaagtagcggataagacagtggcgatcgccggactgggggtatccggcacctcgttggcggaggtattgagggaacgcggcgcccacgtgattggcgtcgacgagaggaagcccgaggctgatctccgctcctttgatgacgtggactgggaccacgtggactacgtcatgtcgtccccagtgttcaacccccgtaccccatttgtgctggaagcccaacgccgtggcatccccgtgatgagcgaggtggaattcgcatggcaactgcgtgtgaataacgagcgcaccggtactccggctccatggatcggcatcaccggcaccaacggcaaaacctccaccaccgagatgacctcggaaatgctcaccgcctgcggactcgacgcgccgaccgccggcaatatcgcctccggagacatgagcatgagcctgtctcgttgcgccaccaatcctcagcacgacgtactgtgcgtggaactgagctccttccaattgcacttcaccgattcgctggcacttgactgcgcggcgatcaccaatatcgccgacgatcacctcgactggcatggcgggcgagagaattacgccgccgacaaatccaaggtgttccacaacgccaaacacgccatcgtctacaatgcgcaggacgccaaagtcagcgaactggcggccgaggcccaaaccgccgaaggatgccgcaaggtgggattcacgctcgaggccccccaggccggtcagatcggcattgaaggtggctggattgtggacaggagcggcgtggccggcggcgcagtgggggagccggtcagactggccgccatcaccgatttcacgcatctggcagagccggacggctcactgtacccgcatctggtggccgatgcattgacggcattggcgttggtgctgggacttggcgctgatcgagataccgcgttgaaggcgcttacctcgttcaagccgggcggccatcgcatcgaaaccgtggctgaggccgcagtcgagggcggctccgttcgtttcgtggacgattccaaagccaccaacggtcatgcggcacgcgcctcgctgtccagcttcccggccaagtctgtgatctggattgccggaggtctggccaagggcagtcgattcgaggacctggtcaaggaccaggcgcataccatcaaagcggccgtcatcatcggcaaagaccagcagccgatgatcgaagcgtttgccagccaagctccggacatcccggtgaccatcatcgatcccgaagacaacgataccgtcatggatcgtgccgtcgaagcctgcggcacgtatgccgccgccggcgacattgtgcttatggctccggcctgcgcctccatggaccagttcaagtcctatgcggatcgaggcaatcgattcgccgccgcagccaagacgtggagcgaggtgcatggcctccactgata

SEQ ID NO: 3004 - DNA, 16776 bp, Unknown
  R19_24m  MAG No. k141_12938
cgtgcggcagctgaaagtcatgctggggctaccggcctcggcggagtctgccactcccctgcccaaaactattcgcttggccggtatgagcacgtcttcgctcagtgaggcggcggctacggccgttcagccttcactggatgacatgctcgaagaggcctacaatgcccgcggccagacctcacaggcacgcttgcatgatgccgaggccgcgctggatgccgtacgccgcaaatttggcagcaaggccgcccagtttggggcgtgacggccctgcggcgtggcttcccgccagccgcgcgggctttccacgttggacattaacaaacaccgggcaggcaccaagcaggcaccagcctcttggcgtacgtttccccagaccaatttccccatcatctggaacaacgtacgccgagacgaagcaaacgtacggcacctcagacaagaacgaaaacagtccggaacaacatacaccgagctgaagtaagcgtacgtttccccagacaaggacgaaaaaagtctggaacaacatacgctagctcacacgcggacggccgcgccctcccaggggccaagctcacggttggcgagggagaccacggcgtgcgaggcgtcgtaggtggaaatcacgatatccggttcggtcaccccgtgctgcaccagttcggcggcgtcgcgcggcagatcgaccgttcgtccggacaggttgaccgccaccagcagcttctcgccgccgagcgtgcgagtgaatgcgtagacgtactggtcgtccgcatcgatcagttgccagtcgccggcggccaccaacgcattctcgtggcgaatggcgatcagccgcttgtagaacgtgtacacggagtctggatcgtcgaattcgcccgccgcattgatctgggtatgattccggttcaccgaaatccacggctccacggcggcgtccggcgcggtgaaccccgcataggcggaaccatcccactgcattggcgtacgcgcgttgtcacggccgcgggcggcgatgccggccatcatcgattccgcggactgcactttggcttcctcgacccgctgatggtaggcattgagggattccagatcgcggtactggtccagccgggtgaagtggacgtcggtcatgcccagctcctcgccctgatagacgtagggggtgccgcgatgcatgtgcagcatcagacccaacgccttggcggaacgtacgcggctgccctcggtggagtcgtctccccaacgggagaccacgcgcggctgatcatggttgccggtgaacaggctcgcccagccggcattcttgacggccgactgctgcttggcgaaaatacgcttgagctggggcaggtcgagcggcagcggcttccatttgacgttgtcttcgcagtcgaagtccacgtgttcgaacaggaagagcatgtccagttcgccgttggcgggattggtgatgtgctcgttgcgctgggcggtgatgccgggggcctcgcccacggtcaggaagccctcgcgcccggcgaacacctcgcgacgcatttcggccaggaattcatcctgacgagggccgtccgcacagaacgggttcgggttggagtagccctcctcccccacgggcaggtcctcaagttcggaaccgtattcgccgggcagacggccggccgaatcgatacgcttggaaatgagggtgatgacgtccatgcggaagccgtccacgccccggtcgagccaccagttcatcatgtcgtacaccgcacgacgcaccgcaggattctcccaattcaaatccggctgcttcttcgagaactgatgcagatagtacttgccgcgttccgggcaatactcccacgccgaaccgccgaaataggaaccccaccggttcggctcggcccccggctcacccggggtggttcccgggcgggccggacgccaccagtaccaatccgcatgaggatcggacttgtctttggacgcctcgaaccacgcatgctcgtccgaagtatggttgaccaccagatccatcacgatcttgagcccccgcttgtgtgcctcggccagcagctcgtccatatcctcgagcgtgccgaacagggggtcaatgtcctgatagtcggaaatatcgtagccattgtcgtcctgcggcgacctgtacaccggcgacagccatagcacgtccacgccaagatcggccagataatccaaacgcgaggtgatacccttcagatcgccgataccgtccccgttcgaatcctggaacgaacgcggatagacctgatagaccacagcattcgaccaccacggattcggcgtggtgccattggttcgaacggaatcgggaagcacgacacgctgcgcagtagtcatgattgcaacctttctaacgaatgtgacgggaatcccggagggcggcaagaaccctccaggattccacagactgatgacgggatgagacggcttacttgttcgcgcctcgcatcacgccgctgatcacccacttctgggcgaagatgtagacgatgaggatcggggccatggccatcaggtagctggcaaacgccaccggatagttggcggtgaactgcgagctgaacacgaactgcgccagcgggatcgtctgatccgcggaattggacagcaggatcaacggcaggaggaagtcgttccacgcccacagcgcggtcaggatcgcgatggtggcgttgatcgggcccatcagcgggaagatgatggtccagaagatgcgccaggtggacgcgccgtcaatgcgggccgcctcttccagcgacaccggaatcgaacggatgaagccgatggcgatgaacaggttggtgcccaggccgaagatcatatacaggatgatcaggccgaacttgttgtcgaggttccacccgcccatctgcttggccagcggcagcatgatcacggagaacggcacgaacatggctgcgatgaagaagtagtacaggaagcggaagaaccgcttgtccatgttacgggccaccgcataggccacgaacgtgttggtcagcagggtgagcacgatggcgcccacggtgatgatcgccgagttcagggccgcgcgcggatagttcaccatgttcgaggcctcggcgaagttgccccactgccagctggtgggcagggcgaacgtgccggcttcggccggggttttcagtgcggtgacgatggtgaagtagagcggcaccagaatggtcaggctcagcaccgcgaccaccgcggtcagccaccagttgatcttatggtccttgcggaacttgtttttcttgggttgtgcagcaacagcgctggtcatgatcacaccttctccttgctaccgaagaacttgagctgaatgaacgcgatgatcgcgaggacgatgaagaacatcaccgcattggcggtctggtaggcgtattcgccaccggtcaggccgccctggtagatgaggtaggtgaccgtttccgtagcggagttcggaccgccaccggtcagggcgaccacctggtcgaaggtgcctaaggcgcccttcatcgtcaggacgaggttgatggtgaagaacggtccgatcagcgggaaggtgatctgccagaacttctgccaggcgctgacgccgtcaagggcggcggcctcgtagatgtcggtgtcgatggtctgcaggccggcgaggtagatcagtgtggtgtaggccacgccctgccatacggagagcaccacgatcggcgcccatgccagcgattcggaggtgatcatcgattcggacagccaccctatgcccaacgccttgccgagttcggggatcggcatcatgaagatgtacttgaacacgtagccgaccacaagcacggccagggtgtaggggatgaagtagatggcgcggaacccgttgcggaacgcgatcttggagttgagcagcacggcgatgaacatggacagcaggttcaccagaatcgtcaccacgatggcgatgaagaacgtgaacaggtaggcgcgcccaatgcgctcatcctggaacatggccttgtagttggtcaggccgatccatttgtatttgccgtagcccttggaattggtgaaggagtacatcacgccgcgcaggaacggccagtacaggaacaccatgaacaggatcatggccggaacggtcatccagtagtatgcgggatcgaccttgcgatgggagaaagcggagacacgcttcttgcgtggtttttcggcaatggcggacatggtgaacctccttactgtacggtcctggcttggatctgatcccactgcgtctgcattgaattggtgaacgcctcaacgttgccggtggtcagcaggctttgcaggctgccggccatggtcatggacgaggggatgtagtggtcggcgaaatcagcgatgcgtccctccttgtagaagtggaggatgttctgcagagcctcgtcgccggcgtaggtgtccttgaacggggtgaagcagaactgcgattcggcgtattccttgagccggtcctcgtccatcaagaattccacgaacatgcgcgattccttgggatgcttggtggtggccgaaatggtgagcacggtgtcgtcgccggcggtgagcacctgctcgtccggatcgtcggtggcgggcagctgggcgaacttcacgttgatgtccgggttgaccatgcgcacctgcggcacgacgtaggtgcccaggggcaagatggccgccttgccgttggcgaagtcctgggtggcctgctggtaagtaacgcccggattgtcctgcgtgtactggtagaactcgacttccttttccgccacgggaccccacaggtcggcgaatgtggcggtgccgccgctgagcttcgagtattcgctgatcggcacaagtgtgccggccagggaggcgaacggcgcctgagtggtccacggttcggcgaggctgccttcgatcggcgtgatgccggcctgctggatctgcttcatcgcggcgatgaactcggaccaagtttcgggcaggttgtccgggtccagcccagcctgacgccacaggtccacgttgacgacgtagccgttggcgttgccggcgaacgggatgccgtacgcgcggtcggcgctggtgtcgtacagtttggccagatccttgagcagcttgaccatctgcgggttgatgttgtcgaggatctcgtcgtcggtgaagtcctggaagattcccgaggcggcgaattcgccgaagtaacggccgccgtccacggtgaggacatccggcaccttgttcttgacgaagcgcgtgcgcagatcggtggcggcatcggcggtgttgatgatgtcgatggtgatgttggggtgttccgcctcgaatcccttgaccagcttcttgaactggctgactgcctctaccttgtactggaagaattcgagagtgacgtttccggcggtggatgtgccacaaccggcgagtgcggccacgcatgcggcgccggcacagacggcggcgatggcgcgggatatgctgcgggtctttgccgccatacggttcgggcgtcgatcatgcccggaggacgaccagcgctcggtccaagacgatgcggacttcatctgctgcttctcctttcatttacacttcacgacttcgctactccgcgactgtcgtgatgtatacgttaacacccatatttattgatatcaaacggcataattacaggatttctgtaaacggttacattccgtcatggtatgattgtggccattatcgagcacccatgaggaaggttcgcgcgtgatacattccacgatctacgacgtagccgtcagggccggggtgtccgtggccacggtgtcacgaacattcgccaaaccggatatcgtcaccgaggccacgcgcaagaaagtgatcgaagcggccaacgaactcgacttcgccatctcccggtccgccaccgcgctgaaatcgaaacacacgttccgtatcgctatgctcaccggcgaggcgatcgccacctggttcgactccaatctgtacaaggggctgaccgaggtgctgcagacccatggctacgacgtgtccctctacggcattgcggacaccgaacagcgcatgtcgttcttcgacgagctgcccctgcgccgcaatgtcgacgcggtgatcgtggcctcgttcaacgtaaccatggaggagatctccaacctgcagggcatgggcgtgccgctgatcggcgtcaacgtgccgcacaacgaggggttcaacgccaccgtgtccatagacaacgccaagagcatgcgcatggccatcaatcacctgcatgccctggggcaccggcgtatcgcctacatctgcatcgacgtctcggaggcgccgatggaatacagtgcggactcgcgcctgcagagattcgaatcggcctgtgcggcgtatgaggatatcgaacagttgaccatagccctgccccgcaacgacttcaccgtggacgaggcgatcgcgcgcatcaccgtcatggaccagccgcccacggccctatgctgcctgagcgacgggacggcgctgcccctgctgtacaagctgcccaaagccgggatcggcgtgccgaacgacatgtccctgatcggattcgacgacagcgactatgcggccgagttcgggctgaccaccattcatcaggatccgcaggccctggggcgcaaggcagcggaaaaggcgctgtcgctgattgattccgcgacgttcggcattgacctgggcgagccgttcgagaccgcgcgcacgttcctggccatccgcaataccacggcggcgccccggcggtagtcggtgtcgtcaggcgcgggccgattgcagacgttcgcaggcggaacggatggcctcgtcggtggcggtggcggagaaacgcaggtaggcgggagcgccgtagaattcgccggggctggggatgatgccgatcttggcgagctcggccatatcggcccagcagtcgccggacttggccttgacccatacgtacagcgcgccggagggcatttgcgccgaatagccatatgccttcagtgcgtcaaccagcgcggataggcggcgacggtaacgcccccattgctcgtgcacagcggctgtgtccttcagacctgcggccatggcggcctgcaccggtccggggataatctggccgatctgcttgcggtattcggccatttccttgaccagccggtaatcgccggcaatcagagccgtacggtagccggccatgttggactgcttggacagcgagtagagcaccaggatgccagctgccgaaccttcacacacatgtgaattcagggcacatggcgtggcggagagactgaatgcggtatcggaggcgggctcgttggattcggccaccggtgcggcaggcacagacgcagcagatgcagacgcggcaggcgcagaggacgcggctgtattgcggcgcaccgaacgccagtccatcaacgcatagcattcgtcggagagcaccacggcaccgatgcgacgggcagcagccacgatgtcggtcagccagtcagcggagatgacctcgccggagggattacacggcgagttgatccagatggccttgacgttcggaatattcacccaggaatcgacgtcggtcacatcatcgactttgaccacggtggcgccggcaagttgggtaccgatttcgtaagtcgggtaggagacagccggttggacgaccacatcgccttcgccaaggtgcagcaggctggccatcagcgccacggcctccttggaacccacggtgggtacggcggcagcgttgatggacttcagatccacaccgcgcagttcgcggaaccatgtatcgatagcggccttaaggtcggcgctgccggcggtgaccgggtatccatgggcgttgggggcgtctgcgccggcaaccagcgcctgctggacactgctcggcaccgggtccacgggcgagcctacggacaggtcgatcatgccacccggcacggttttggcggtggctttgaagccggcgatacgagaccagtcgtatggcgacgaatatgcgtggaagcccatgagaacccctttcttggacggtatgttcctaagatacgacgaaccctcggccgtgatagaccgagggttcaatccgaactatgcgctgtgtgcagcgcttatccgcaaatcagtttactggttctgcggcggcagcgcggcgacctgttccgggtctttgccgattgggccattggcggaagcgccgcccaaatcgccgacttcagcgaagaagttgacagcggcatccttgtaccaagcccactcgtccggcagatcatcctcatagaagatggcctcggtggggcacaccggttcgcatgcaccgcaatcgacgcactcgttggggttgatgtacagcgagcgggaaccctcgtaaatgcagtcgacggggcactcgtccacgcaagccttgtccttgacatccacgcaaggctgagcgatcacatatggcatggaatcctccttaacagatactggtacgagggtacgcgcccgttgggacgctcctcgctctcagccgttaacggccttatcggtttcggcggacagcgtttcggtcaggtcgcccttgccgaggcgcgcatgccagtagccgtagccgaagtagatggcgacgccgaccacgagccacaccacgaaacgaatccaggtgagtacggacaggttgagcatcaaccagaagttggccacggcgatgaggatcggaatccacgggtcgccgggcatcttgaaggcgcgcggcaggtcggggcgcttcttgcgcataatcgggatggagatggccaccagcgtgaaggcggacagggtgccgatgttgaccatgtcggagagcacgccgatgtcgaagaaggcggccacgagcgccaccaccgcgccgacgacgatctgcagagcggccggggtgccatgcttgccggtcttggacaggccgcgcggcagcagaccatcgcggctcatggcgaagacgatacgggtcaggccgagcaacagcaccatgaccacggtggccaggcccagcacgatgccgaagctgatgatcttggcggcccagtcggcacccaccagttcgaaggcggtggccagcgaggggctgtcttgcttggcgagatcggcataggagaccatgccggtggtcaccacggccacgagcatgtacatgacgatgatgagcagcatgcccacgccgatgccgagcggcacgttcttgtgcgggttcttggtctcctcggaggcggtggccaccacgtcgaagccgatgaacgcgaagaacacgagcgccgcgcccgaaaggatgccgggaacgccgtacacggatggggtcatgccggtggcgaactgccacagcggctgggtcatcacgccggtgacggcggaggagccttccacggtggaggccggctggctcggcggaatgaacggggtgaagttggaggccttgacgtagaagaagccgacgatcaccacaaagaacacgatggcgatcttgagcacggtcatagcaccgtccacgcgggcgccgatcttggtgccgaatacgagcagcgtggtaaagaacgccacgatgatgatcggggcgatatcgatatggaaggagccgaacgccaggttggtgttggcgttccagcccatcaggcgcatgaaatcgttgaggtatacgccccaatatttggaaatcacggagccggccatcagcatttccagaatcagatcccagccgatgatccaggccatgatctcgccgaccgtggtgtaggtgaaggtgtaggcggagccggccaccggaatcatcgaagcgaattcggcgtagcacatcacggctgcgccgcacacgatgccggcgatcaggaagctgatgatcacggccgggccggcgtggaaggcggcggcctgcgcgcccaccgagaagatgccggcacccacggctacggccacgcccatgattgacagatcccaccaagtcaggttgcgcttgagcttgcggccctcttcacccgtttcggcaatggtctgttcgacggatttcgtacggaacagttgcatagtgctcttctttttctctgttgtttgcgcaccgaatgcgcacaataccgacaatcgagtatagaagagcccgtgtgtcttgtatattaataagacttagagtccgcaatatatgggatcaataccccactccatcgatcaatagcgcgattacagcacaccgacgcagaccggttcgggcaccaagtccactccgaacgcgctcttgactgcctgctgaaccgcgcgcgccaaagctgcgatatcggccgcgctcgctcccccacgattggtcaaggccagcgtgtgctgcgtggatagactggccggcgcgtccgcatcgaccttatatcccttatggcagccggcatggtcgatgagccaggcggcggacgtcttggtgccgggagtgccgtcgggcagagtcgcgtcgaacttcggcgcatcttcgggcagggccgccgcttggccggcggtcagaatcggattcataaagaacgagccgcagctgtggcgattgtagtcgggagcaggcaggccgtcatcgccaacgggaacgccggcggcctcattgagggaggccagacgctccagatcggtcaggatattggcctcgcgcttggcggcggccatgtcgggcaaggcgtagcgagtgggatcctcaagcatgcccttggcggcacgtactgcgagcacggctttgcggatgtcggcggtggccatacggtcgcccacttcgacgccaagcgctttggcaagctgtccgtaacctaccgtgccttcggccgagtgggtcagggcaaaggtgacggagagcaccacgtaacgtggcgtcgggaagaatcggtcggccggccggccgggaccggcgtacatgctggccttcagtgcggagtatcgatagccgaatcgaagatcggcgggtgtgaggtcgcgcgttgttttggtgtctcgatcccagacttccaccgattcgaccgaagtggcgacttcctgtccgtaggcaccgatgttctgcaccacggaagcgccgactgtgccgggaatgccggacagtccctcgacgccctcgagcccgagctctacggtgaaggccacgaaatcatcccaattggcaccggcctcggcattgacatgcacggtgcgatcctcgccctctaccggtgcagcctcgtccggcacagtgatgaggcgtcgggcgtctcgaaccaccacgccgtcaaaaggcttatcggaaacaagcaggttggagccgccaccgataacgaccaagggcaggcctttggaatcggcatcctccacggcttcgatgagccccacgcgcgtggtcggctcgatgaaatgggcgatggggccgcccacgcccatggtggtgatgtctgcaaagcttgtcatgacttcctatcttagtggcgcaggtgcgatatcggggcaatcatcggctgaaacggcagaacgcccgcgaggggttcgttcagacgcgggatttctgccgtttctcacgcgatgcggatactgattccgcaccctaccactcggctctggagtcaatacgcaaaaacccggccgaatgggccgggttctgtaaagctgtgatgcttgcgatcaacgagtctcgcggtgcacggtctgcttgccgcagcgcgggcagaacttcttgagctcaagacggtcgggcgtattacgacggttcttagtcgtaatgtagttacgctccttgcactcggtgcaggccagcgtgatgcccggacggatgtcggcgctcttagccattgtcattcacctctgtgttcttaggtatagtgcgcgcccaccggttagcgggcgcgatttgtagcgaggaagaggctcgaactcttgaccttacgattatgagtcgtacgctctagccagctgagctaccccgccagagagccccgagtgagaattggactcacgacctcttccttaccaaggaagtgctctaccactgagctatcggggcgtggcggatagtggattcgaaccactgaagcacgaagcggctgatttacagtcagctccctttgaccgcttgggaaatccgccagtctgtttcccgccgcggtgtttgacctcaacaggcaacttggctatataaccacatattttccaagtacgcaaatcgacctctacgcgaaccttgttttaccgcggaattctgcggttttatcggcgtgtctcacagcgtggtttcagggtccgcttcggccctgcaaacagccccgaccaaggctgcaccccgcacttctaccaatcatttttcttatatggtgttccagaaccttgcaatggcgcggttttcgagtggcgtcgcctgcttgcggcggcacagcgcatgccggcatgctgggcgcatggcttctgatcttgtacatcacggacaatcattcgacgaccagccgctcggattcggcacgctggccattcacctcggcaacggggtcgacgccgaaaccggcgcgatccgtcgccccatcacgctggcgaacacctacgcactgccctacgacgcctcggccttggcgattgccaagcatctcgaatcgctggatgtggtgcgtttcgtggcgtaccccggtctggaatcgcacctgcaccacgaggtggcggccagccagctggcccgcccggactccgggttcggcggcgtgctgtcgttcggcctcgacaccgaccacgacgggcacaaccgattcgtttccaagctcaatgtgattacgtctgccgtctcgctcggccatgactaatcgctgatcgtgttcctcggtgaggatgacgagcgccagtacctgtacccgcctgagttccaccgcggcttcttccgtctggccgtgggtctggaggatacggacgatttgattccgcgacatcgatcacgcgctggtggaggccggattcgaggtgtgagaccgcaccgcgcgcatgatttcggtctcttccgccctgctgccgccgtcagtgagtcacaagatggctcggtgacgacgatggcagggctttttacgtcggcacagggacaatacctggcggtctgccgacgatgacggcacttatcgtcggcagaccgccagtttttggaccgtcgccgacacaaaacgccgatttgccgtcggcaatggtccaaaaactggccctataacgacgccaacgcggctcagcatcggcacatcgccatttcgtggcccactgccgacgctggcctcatgccacggcactcagcgtcggtagagagacaaccattggcacagcgacgacaccacgaacctgcgacacggaaaaaaacaacataccgtcgacctactgccgtcttgtgcaaaatgtcttaagccgctcggccaagtcgccgactgagcctcttccatagggaccccaatccgttacccagtgtagatgcggtgcaacgccgaactcaactacgctgcgcgcatgcacctttatgcatagcaggcatggctgggcgtttggcgggagcggttttcggctcccctctctgaggggagcccctttccgcctgacaagagaaaaccccgactgttcgtgggaacagtcggggttgttgaagttcgctaggcgactaatcagccgaggatggcgagaatgtcgcgcgcgccgacgatgaggtagtcctcaccctcgtagtggacttcggtgccgccgtacttggagtacagcaccttgtcgccgaccttgacatccatcgggatgcgctcgcccttgtcgtcacgacggcccgggccaacggccaggacttcaccctgctgcggcttctccttggcgttgtccggaatatacagaccggaagcggtctgggtctgggcctcggcctgcttgacgatgatcttgtcttccaacggtgtgagcttaatcgacactgtgggtcacctcgtatctacttgtagttcgataatgccgcgccagaacgcctcaagaggctgacgatcacttgcgttgtccctttgcgctaggacacatcgtagcgcgattattagcactctgccaactcgagtgctaacgctgtgagagaaaatcggcgaatcgcaacgctcagttgccgcggcgggcaagaatggagtccaagcctgcgcccaacgaatcggtggtcgccgctggcgcttcgacgtcggcacgctcctcggattcgtggaatgcggctcgctgggcggcgtttgcagcctcgtcatcggcgtccgtagcggcgttcgtatcggcatcatcgcgctgctccgactcagtgtctacagcgtttccggcactgacagccttgcccgcatcggcggccttggcatcgtccgcggccttgacggctcgggcctcgtcaatcaacttttccgccactgcgggttcgacaggttccgccttggacacctgacgggtcgacttgatctccaagctttccggagcgttgtcggcgttatgttccccgcccaaagtgaaggagatgagatcctgcgaggtggccatatcgaagacatccagtgctcgggcagggcgtacgctgaccagttccgacgtagcgtcggcagcggcatcgtcgcgctcatcacgctcatcacgcaccgtaagcgatggttcaactcgaggggcgacggacttatccgacttagtcgacttatccgtgcgagcggaggcatcgggcgcggcggaagattcactggtttcggcagcggacttacggtcagcggattcatcgaccatagcagacggttcggcggcaggcttatcggcggcggactgtgcagtatcagacttctcagactgtttggcgtgctccgccgcggcctgatatgcggcggcggactgacgcaacgccttggccttggcctgctcaatctcggcatcgcgtaacgcgcggcgaatctgccgctgttccatgacctcggtggcagcatcctcaacatgctcggaaagctccttggcaggcgcagttacggccgcaaccggttcggccttgttcacacgcttgctgtccttggactcggcagacggtttcttggaccagcccgtaccgctatgagtccgctcgtagcggaccaccttgcgttcccattgccgggcctggcgtgaggcattggctcccagcaccagcaccagcagtaacagcacgaacggaataagagcaagcagcgggctgaaatgcagggggaacgatacggcaaacaccaacccggttatggcaagcaggcatacggcgagaatctgccggcggcggatggccgcgcggcgcagttcccgcacatgggcgatgtgctcaggtgtcagcctcgctgacggtgttgatgctggcattgctgcccctttcgccttatgcggcttgatgtctccgaatcgtctgccgttctctgcatcaacgatatgcagggaaggcgaataacgatcctgccggtgctcgtccacacgtttcatgccgttggccgtacgtacgggcagccatacaacgataataatcgccacaatcaccagcacgacgacagtgctcagtgactcataacccatagagtcaaggataggagacgtaccgacgaactggggctttccgtccgggcgtgtcggagcggaattcttccggtcgacgcttatctggaaccggtggcggcgagtctggcagagaacccttgccccatatcttcagccaacagcgcaaatgttacgtggtcgcgccactggccattgacatacatataccgctcgcgcagtccctcatgatgggctccgaccttacgcactacagccaaagagcgcgcgttatccggaagaatggcgatttccagccgatgcaacgcgggcccgaatgggtctccgagtgcccaatcggcaagcatggccagtgccatcggcgcaaatccgtggccggcgtaccgttggtcaacccaatatccgaccacaccggtgcgcatggcaccatacgcgatggctcccaacgaaatctggccgacgatacgcatctggtattcgatggcgaaaatcacgccgacgccatgctgctcattacggcgctgtcgctgcacccattgattgaaggtgatggagccgccatgcatcgggtcgccggattcccaaggcgccagccagtcgttgttgcgccagcgcacttcgttccagccgtcctcatcgtccatggtcagggggcgcaggattatcgggaaaccgggatgggtgaggcgcggcggacggatctggtggtccagcttgaacgcctctttaatcgactggaaaactgacacggcctttattgtagccatatgaagggcttgcgccttcgcctcggccactttcgttttacggtggaaacactagattgtgcggtatgagcgaagcggacaatggcatgaatatcggcagcgaccacagcggcacggagaaaacagaaaagatggataaagcgacgctgcgccaccatatactgtctcggcgcaagcgcattccagcggaagaacgtggagcggccggtgaattgctggtgcgacggttcccggcacacatgattcaggatggttccacagtggcggcatatgtgtcgatgggttcggaaatcgaaacccggccactgttgcgatggctgttggctcatggctgccaagtgttggtgccacgattgggatctgggttggatattggctggagtgtgctggattcattggaatccttgcgctcgatggatgcagtgggtggcgcgaacaatgccggtagctgcagctctcccagcaccgtccatcacagacc

SEQ ID NO: 3005 - DNA, 17304 bp, Unknown
  R19_24m  MAG No. k141_13203
cacagagtcccgacaccgtcctcacctcgtttatcggcaccatgcgtgtataaccacatatggcattatcggcgaatatcggccggcagaccagttgcacaaggagaacatcatccacatggcagacaccgccaacaccaacgcctggttgccggcgctcaaagcggcgtttccgctgaccataccgatttgcctgggattcctgtttctcggcgcctcatacggcattctcatgggcaccaagggcttctcgtttgtatggccgatgtgcatgagcgcgttcatcttcgccggttcgatggaattcgtcacggtgaatctgctgctctccgcgttcaacccactcgccggctttctgctggccctgatggtcaacgcccgtcacctgttttatggactatccatgctcggcaaattcaaggggctcggctggaagcgtccgtacctgattttcggcatgtgcgacgagacctttgccatcaactccaccgcgaaaatccccgccggtatcgaccgaagctggttctacttctgggtcacgctgtgcaaccagctgtattgggtgaccggcgccacactgggcgggctgattggcgcgcatctgccgttcaataccgacggtcttgatttcgtactgaccgcgctgtttctggtgatcttcctcgatcagtggctcgccggcaagcatcgcgagcgactgtccgccgtcatcggtgtgctgacgtcgctggcctgcctgctgatattcggggccaatgatttcatgattccctcaatgatcgccatgctgatactgttcgtcgcgttgcgcccgcatctggatgtgttgcggccggccgccgacgccccggaagccacggcagaccgtgccatgagccacgcagcggaccagcagaaggaaggacagacgcgatgacgatgaccatctggcaaggcgcgctcaccatcgtgacggtggcgctggggacgatgtgcacccgttttctgccgttcctggtatttcccgaatccaagcagccgccgcgcgtcatcgaatatttcggccgagtcctgccctatgcgatgaccggtctgctggtggtatacgcactgcgcaacaccccgattctgaccggttcacacggccttccggaactcatcgcctgcaccgtcatcgtgctgctgcacgtctggaaacgcagtatgctgctttcaatcgccggcggcatgatcgtatacatgctactggtgcagctggtgttctgaggttgggctcggcttctccttcgttgatctctccctccggtcgccttcggcgaccacctccctctgtgagggaggtgctgaacgcagcgaagcggaggtagagacccgcggtcgtaagactgcgaaacacacagcatcggccacaggccgattcctacagctgcttcgccacccaatcgacgatgtacggagcgacttcctcaatctggtcgatggcgacctcgaactcgtgcttgccgccgtaccacggatccaccaaatcaatctgatcctcgcggccgggcttcggcttgggcagattcgggtcgaagctgcggtacatgtgcacttcggcgcgcttgccggacggcagcatgcgcagtagggcgcgcatgtgggaggcggtcatcggcaggaacaggtcggtacggtcgatttcctcacgtgagatgcggtgtgcgaagtggtcacgcggaatctcatcaccatagccacgttcgcgtagcacacgcacggcacgcgggtcgatcggatggctccactcctcgtcggacacaccgctggattccacgttcacctggtcgccgagaccgcgctcattaaagaagtgacgcagaataatctcgcccataggcgaacggcagatattgccggtgcagacggtcattacggtgtagggctgggtattgctcatagctttgaatcaatcctcaatcgggcttcaccgggccgcacacggcccgaatgtgtttttggggtcgaatgaatatgaatccggctcatgccgccataaaggacacaagccggattcgcatgcttacttggttttgaccaagatacggaaacgataggaatcgatgccggactcctccttggcgggcgtacgccactcacccacttcggcttcccgccacatcccggcctcgaccagcgacgccatatcgggcgcatagctgtcggcatccacagtgacggccagatcagtcacataggctttgtccgcgaacggcaacgcctcggcgaacagctgggcgccgccgaggatccaaatctccgaacgatccagaccgtcgtccggaatcgcctcctgacgggccatatcgagcgcgtcgtcaagactggtgaccacagtggcccccggcgcacggtacatcggatcgtgggaaacgacgatgttgtcgcggttgggcagcggccggtacttgacccccagcgattcccaagtcttacgacccataatcaccggatgggagacggtcagctccttgagatgcttcatatcctcggcacagtgccaaggcatgccgccattgaggccgatggcaccggcgcgaccttccttgtcgcgggcttcggcccagataagattcaccgagaaggtcttgggataatcgtcaccccagtcttcttcagtggcagacagcccggcagatccgggctcgggttcgtgatagccgctacggctactgtcatgctccatttcgcttactcctcctggattgcggaactgggccttagtgtagtggacagcgaagactcgaggcccgtcgcctccacagtcttcgctgtccacgaaatggtaatcagcatcagaccgcaacaggtgccttaatagtggggtgatgctggtagccgacgaccttgaagtcctcatactggtagtcgaacagggaatcggccttacgaatctcgatggtcgggtacgggtagggcttgcggcccagctgctcaaggaactggtcgacgtggttgtcgtagacgtggcagtcgccgccggtccagacgaattcgcccggcttgagcccggtctgctgcgccatcatcatggtgagcagcgagtaggaagcgatgttgaacggcacgccgaggaacatgtcgcaggaacgctggtacagctggcagcttagcttgccgtcggccacgtagaactggaagagcgcgtggcagggcggcaacgccatcttctccacctcggccggattccacgcggagacgatcatgcggcgcgaatccggatgatgcttgatgaggtcgagcacattggagatctggtcgatggtgcgattcgggtcctcgggggtcggtgcgggccaggaacgccactgcacgccatagaccgggcctaggtcgccgttctcgtccgcccactcatcccaaatatgcacgttgtgctccagcagccagttgatattggaggaacccttcaaaaaccacagcagctcgtaggccaggcccttgaagaacacggtcttggtggtcagcagcgggaagtacttcgacaggtcgaagcgcatctgctggccgaacagggaaatcgtgccggtgccggtgcgatcggacttcagcgtgccttcggtcaggatcttgcgcaccaggtcctcatagggcatcggaatgtccgtttcgggacgtgcggggatacgggagcgaatatctgcgagttgttcttcggtcaaagccatgtgcaccagtgtagcttaggggcataatagagaagtccgatgatgcgggagagcggccaggtgccgcgctcccccgctggcatggcgatgggccagatcgccggcggctgaaaataaaggagcagctatgggtaagcgactgtgggttgaacgcaacaaggacggttcgtgggatgcgttcagcgacgatggcgcgcacattaagttcggcaaggatcgtggccagttcacgccgggcgatctgatgaaggtcgcgctggccggttgcgccgcgctgtccagccagttcgccatcgaacatacgctgggtgagggcaagggtgccaagatcgtggtggatggcacgtacgaccccgagaacgacgcctacaccggtttcgaggagcaggtggtgattgatgcttctgacgccagcctgtccgaggaggatgccaacaagctcaaggaacgcgtcacccgccatatcgacaagggctgcacggtcaagcacacctacgtacaggagaccccggtgcgcatgaacgtcaccgtcaagcactgacgtactaataaaccgacgtactaataaattgagctccctctgatgagggagctcattgtatacccggactttactgcctgtcgggatcgatggtcttttcgatctgctgggcgacttcaggctcggctgcggacaccggaatctcctcgacgccggcaatctcctccagcgacttggcaggcacttcggcgggcgagctcggcacggtgtcgagacgcgattccgcagcctcaacatacttgcgtggcaccacgtacaccgggccggccgcatgctgcagcagtccctggctggtggagcccagcagcagaccggtgaagccgccgcgaccacgggagccgacaacaacaacatcgtgatcgtagctggccttggtcagtgcgctgacggccgggccggaaacgatctgcttgttgattttcagatcaggatgcgattcctgcaacggcttgatacgcacctcaagatcgtccttgtaggactccatgatggcatcctcgccatccacgcccttcaggttcggcacagcggaaatcacgtccagttccgcaccccagcacgtggcgaagtcggcggcaatgtccagcgccttcaaaccccacttggattcgtcggagcctacggccaccttggtaatcgtgttgttcaggtgcatcaggttgccgtcatcatcggtgtacggcaccactacaatcgggcagtaggcgtatgccggcagcgacgaggacgtggtgcccagcagacgctcggccagaccgcccttgccacggttaccaatgacgatcagattgtagttacgcgacaattcgacgaacaccgatgccgggtctccggtaacaatcagtgtggcggcttcgacgccctgctcgtctgcgatggccttggccttggccagaatctcctgagcatcggaatgcgcggcgttatcgtcccccatcgccgtgtaagttgcatcgaacgaaacggcggcatagctcggcagggaatatgcgcagacaatctgcagcgtcagccccgcgtgctttgcataattcgcggcccaccatgttgccttgtaactggcatgcgacccgtcaacgccgacgagaatggccttgtcgttaatcatgacgacctccttgaagttattgtggcacgaataccgcgtacctccaacaataccccgcgacactcggtttggccggtatcctccgctcaaaaagaaatccgcgtatacgaaaaaaggcacatcccaaaggacgtgccttaatacgaattcgcttaccgcataattcttgttacatcacgcggcgaatggaatatccagctccaccgaacacggaaacgttgcttattgccgttccctgcaccgggttcatagcattcatcacctgtccgttaccgatgtaaatggccgcatgagtaccattcgcaagaatgtcacccggcttggcatccgccaagcttgcgaccggagtacccacagtggcttgagcaccagaggttcgcggcagggaaatgccaaactgggagaagacgtactgtacaaaaccggagcaatcccatcctgccggagtgttgccgccggcaacatacggatagccttggaacttcagtgagaagctggcaagctcagcgccagtgccagtcattttacccaagtcaacctgtggaatcgacgcacgctgttcagagcggctggctgcagcagcagcggactgggccgcagcagcagcggactgggctgcagcagcttcatcagcggctttctgagccgccgccgcagcaacagcctccttttcggcctgagactcggtctgtggcacatcaagagtctcgatgccaccccatttagagttctcgtcaaccgaagtggaggtggattcggcgaacaaattcttcttcaccgaactcgccttcggaaaagagcgtgaggacaccacagcactcgtctgcgcggaatcggcagaggcaaacggggctacgcatgcaaacatggcacccgtggcgataaccgccactgatgtggaaataatattcttaacgttcgtcatcagcgccttaccttagcacacatgggtcgatttcataacaggaatgtcttttcgaagatgatgtcgcgggtgtatcactcggcaggagaacgcaacgggcctcggataccgattggcatccgaggcctgcaatatatcaatcaataagactgcatcacgggatacgtaccacgatggtgagtttttcggtcatggcgctagcgagagccacgctgtagccgttccagccaccatggaccgcctgaccgttgccgacatacagcgccacatgatcgtagtgcgcgccgccattccatccaccggtgttggcataaatcagaatatcgcccggctgcagggacccgtctgtaactacgtggccaccgggaacattgacgtactcttcaggccaaccgtggaagttaataccacgggccgccaacgcttgactgaccaatgcggtgcagtccatgctctgtccgatcaaagaatacgcacggtcgatagaggcaccggcaccagcggaaaccgaaccactggcatcggaataagtaacagaagagcgagactcattacggctcgcggcgttggcctgcttctgggtcgcctgagcctcggcctccgtctgcttcttggcctcctcttcggcagccttcttggccgctgcggcatccttttccgcctgagattccgtctgcggcacatcgaggttctcaatgccgccccaatcagcattgtcctcaacattcgtggcagtggcttcagtcgtcagatctttgcgcacctgggtgtacgaggggaaggacttggtggaagtcacagtaacaccctcagctgcagtcgctgtaggaacaaacataaacgagcaagcacaggagacaatcgcggcaacaatggaagaagctacagttttggtcttcatagaaccatcaccttacacggtgcgcattaactcgtacaggatggaagaaataaaacaccccggagctattgggatatatcggcgtgtcggcacaggtcagttcggactaatacgcggtcgcaacacttgaaatgtcatttcgcgcgaacgattgccgatagggcgacgtcacatccgaacagtaatcaccgaatgtaagccaatgaaatgaatcagtagtggacgtactggaacttaccggcttcggcggcgctgaacgtacgggtcgaaatcacacccaatcccttggcattggattcggagatctcaatggagccgtcggcattgatcttttccagaacggcaacatggccgtatgtgccatcggcattggcctggccaggagcgaacaccacagcatcaccgacatggcgaggagtgttgtccacccaatagcccagagcggaagctgacgccgcccactcgccaccattgccgaagttgccgctggaaggcagtcccagttcggcacgacgctggtacgcgtaccacgtgcactgaccccacggatagttgttggagttggtgccaacggcatggttcgggttgaagccagccggcacagcatcgccatcggcatccatgagagccgacaccacaggattgttcgcattattgcgattcatcagcttggcgtccaaggtgctgtctgaattgctcagcccccaaccgccttcattggtggactgtgcggtaacggaggatgaactcagatcagtacgtgcttcggaacgagaagccgcagtcacatcgctgatgcgcttaatctgcgtggtcgtcgtggccggatcagccacgaacgagttcgtggcgtctttattgttggaaaatgcaagagcacctgcggccgtgccgaccagagcggccagtgaggccgaggcaagaatatggctacggcgttcagcggcacgagcggcctcacgaatggaacgacgagtctggggagcgatttcattgatcttctcggcaatgaccggatcaagccccaaaacaacggcgtcgctgccagcggattgcaccgcgcgcacggcacgaacggaatgagaacccttgccggaggcaaacaatgccttcgctaagctgaacttctggcgcgagaccgtggtcgctttatgcgaagcatgcttcatactacgttaactccttggatgggttcggcggggtcctttcaacgaccccgtatgaccggcacaattgagtactgtacaacgaacagaggtcaatcctcaatgcgatcccccaccatccgggcatgtcaaacgatttacgtaaccgtgcggcagggtgaaaaactgccttgtttccgcccgttcacgaacctcactatccggttatcggaagaatcactaactcatgtcattccgacacaccgtagccatgatgtgctgcgtacattctgcactgcattccgcattgccgctactaccgcccggcaccccggaattccgcagtagccccgcagcaatcccgcacaccgagcattatccgcgatattccccaacactggtctacccttgaaaccatgactatcacactgagtattcccgagtcgctgaagccagaagatggtcgcttcggctccggtcccagcaaaatccgccccgaacagatcgccgcgctcgatgccggcgccaccaccctgcttggcacatcacatcgccaggcaccagtcaagcaactggtcgcttcgattcgtgaaggtctgcgcgagttcttccacctgcctgaagggtatgaggtggcgcttggcaacggtggcgccagcgcgttctgggagattgcctgcgcttcgctgatcacccgtcgcgccgcattcggcacgtatggctcgttcagtgccaagttcgccgcgtccgccgcgaacgcacccttccttgaagacccggtgctgttccccggcgagccgggcacttaccgtctgcctgagctcaccaagggcgtggacacatattgctgggctcacaacgagacctccactggcgtggccgccccgattcgccgcgtgcccggcagtcgtgaagccggtgccctgaccgtcatcgacggcaccagcgcagccggcgctttgcccgtggacatcagccagaccgacgtctactacttctcaccgcagaaggccttcggtgccgatggcggtctgtgggtcgccatcctctcccccgaagccatcgatcgtgcggcaggcgtcgaatcaagcgctcatctggaaggcgcacatcgctgggtgccgccgttcctctcgctgaccacggcactgaacaactcccgcaaggatcagaccctgaatacgcccgccgtggccaccctgatcatgatggaaaaccagattcgctggctcaacaacaacggcggcctcgcctgggccaccacgcgttgcgccaagtccgcatccatcctgtactcgtgggccgagcgctccgaatacgccgctccgttcgtcgtcgatgcggacgcccgctcgaacgccgtggtcaccattgatctggacgagcgcgtccaggcctcccagatactgtccatcctgcgagagaacggcatcgtggacgccgccggctaccgcaagctgggccgcaaccagctgcgcgttggcgtgttcccctcggtggaaccggctgatgtcatggccttcaccaagtgcgtcgactatgtggtcgagcacctgtgatggcggtctatgcctcgcatggccgaccatatatgccatgcacattgatcggtctcaactgataccgattgaataaatcgtagggagaggtgtttgacgcccctccctactcttactacagtgcatgagtatgaagttcgcgcctctcattgaccctgccgtccgcaaacccgcgcccaagcccgtacgggtggacctgcgtaaggtgtttgccatcggtaccggtctatggattgtggcgttgattgtcgtgctgattctgctggccgtgggctacagcgtaatgccgttggtgattatgtgcgtggccggtgtcattattggcttgctactgctgatttgggaatacttcgaccgctgggactaccgccgcctcggacagtaataaagttcactgcgccaacggcaacgtcaggctgaacgtactgccttgcccgggcgcgctccatacggtcacatcgccatgatgggttagcgccacatgcttgacgatggccaagccaaggcccacgccatccgccgtgcgattgctctgttccgcaccccggtagaaccgctcgaagatgcgcgtctggtccttcttcgcgatgcccgcgccctggtcgatcacgcgaatcaccgcacggtcgccatccttgtctttggatgcggacacactgaccacaccattttccttggaatagccgatggcgttttcgatgagcttggtcacggcgctgtcgatctgatccgcctcaccattgatgactagatcatcgtcgcccttgatgttcagctgcacgccagccgcggccgcctgcggctccagtcgcgccaccgtggcctcgagctgttccataacgttcagtcggttggcggaagacggcgtaatcggctcctgtgcgcgtatgagcagcagcaaatcggacaccatatggttgagcttgctgcagctggaacgcacctggcgagcatcggcagccacctgctgttcgtccagattgccggactccagcgaatcggcgagtttggccagagcttcagtggggcccaacaattgctcggatacattggtaataaacgagtcacgcacttgagcgaaacgaatcacgtcactgacatcggtaatcaacacgatgacgaactgctcgttgatacgccctacagtcaccttcagccagttggggcggtggacggactgcgtggcgacgtgatcgcccttgttctggtctgcgacgtaccgctccggagtatcggtggtcaagtcgaactggcgcttgccaccagacttgcgcgcctcgtgaatggcatccagcacctgctgctgggcgatggcgtcatctgacaccacacccaggcggtaggcggcgggattgcagcggaccacctcgtcgtgctcgtcgaccaccacggacgcacccggcagcatggacagcagcgtggcggtgtcgtcggacagatcgtcattgtcgtcatcatcggccagcggcgattccacagacactcgatgtgtcgcaaatcccacgatgagcgtgatgattcctaccacaaataaaacagccgcgacaataagagcaatcgcggcgacgagcggcatctgtgtcatgcccccattctttcacaccacacgctgggattgcggtttgccggcgcgccggtaacatgaatttcaggtgaacaacccaatgaacagtagaacaacttgaggttgccattacctacgttgaagtggggaacaagtactggaataatacactggtacaggttgcaataagcaagcatgaaaggctagagaaatgcgcgttattttcaacgaggagctgaagcaggttgctgacgacctcgaccgtatggcgcagaacgtgcgcaaggcgatcaaaggcgctggggaagccctgctgaatcaggacgttgaagccgcacagactgtgattgacggcgacatcgagatcgatgccctggagtcctctgtgatcgaccagtgcgtcaagctgctcgccaagcagaacccggtggccaccgatctgcgtgtggtcgtttccaccatgcgtctggcttccacgttcgagcgtatgggcgatcttgcccgccacgtggccgaggccgctcgccgcacctacccggccgccgcgattcccgaatccgctcagccggtgttcgccgagatgatcgacttcctggacaacaccgctgaccagctggtggccatgctctccgatcgcgatgccaagaccgccgaggccatcatcctggccgacgacaagctggacaacctgcaccaccagaccttcgatctggcgctgtccgatgacatcacccgtcagcagaccgtggatatcgtgctgctgggccgcttcctggagcgtctcggcgatcatgccgtgtccgccgcccgccgtgtggtgtacatcgtctccggcttcgaccccaccaaggagccgacccgcgacgagggcaccgacatcgactgattggggcttgtcctcacattgggcgaataactgaacacttgtcctcctatggtttgaggaggatgcctgaaagcggcgatccggctacggctggacgccgtttttttgttgcttctgggcggtacaccggcgtatccatggggcggcaaaacacccatagggcggtaacttgcccatggggcggtttgaaagatatgtgaaaccgcggaattaagccattctggcataccgccccatgagagttttaccgccccatgagggttttaccgccccatgaggtaatcaccgccccatggggatttggcaggcatagcaaaggggagccacacattatgtgcgactccccttacagcttgtaccgtgttagcggcttaggctcacttctggccttgagcggcgacagcggcggcaccggcagcagcagcctccgggtccaggtactcgccacgcggcttgatcggcttgaagttctcgtccagctcataaagcagcgggatggcggtcgggatgttgaccttggcgatctcttcctcagacaggttgtccagcatcttgacgatggcgcggagggagttgccgtgagcggcaatcagcacggttttgccggccttgagctccggctcgatggcggactcgaagtacggcttcacacgctcaacaacgttggccaggcactcggcttccggaaccggatcgccggcgtagcgcgggtcgttgttctgggcgtactggtcgttcgggtcgatctcgggcggcggggtggcgtaagaacggcgccacagcatgaacttctcgtcgccgtactcttcgcggatctcggtcttgttcttgccctgcagagcgccgtagtgacgctcgttgagacgccagtcacgctgaaccggaatccacagacgatctgcggcatccagagcgatgttggcggtgttgatggcgcgacgcagcagggaggtgaacacgatgtccggaaggacgttcttctccttgagcagctcgccgccacgcttggcttcggcttcaccctgctcggtcagcggtacgtcgacccagccggtgaactggttggttttattccatgcgctctgtccatgacggagcagtactagtttataagtcatacggttcagtctacagccgcgtgcgcccaaacacgagtattcgtcttattatttcgctctcatagcgccacggcaaccgccagcaccaccgcaaacagcaaggtctggaagctggcggcgggcagagccgggcggaattgacgtttattcacgctggagaccatgcgcacaggtattccggtgcccgagagcaacagcaccgcaccccacggccaccataatgtaccacacatcagcagggcgatgatccatgcgatgacgcagcacacaatcagcaacgtacgcgcgccggactcccccagccgtacggccagcgtgtgtttgccatgctcacgatcctcgtcgatgtcacggatattgttcaccatcatgatcaggcaggagaacaggccagccgccacagcacccaatagtccgccgacgtccaccgtgccgcacagcgcgtattcggtgcccaataccgcagccaagccgaagaacaggaacacgccgacttctcccagcccgacgtatccatacggatgcttgccaccggtgtagaaccagccggccagcaaggaggccgcgcccacggccagcaaccaccatgcttgggcgagcacgaccgccacaacaccgcatatgcaggcgatggcggcgcaaatcatcgccgcgaacagtacatgcttggccggtaccagtccggatgcggtcagtcgctggggtttgcctgatttcgattcgtccgtgtcacgcccggcgtcagtgccgcggatgccgtcggaatagtcgttcgcatagttgacagcgatttgcaggaacagcgcgactagcaggcacaggatggtcaccggccagaatcggtccatcagcagggtctgctgttcacgggccgtggcgcaggaggccggttctggatatattgcgatgcaggtgcccgaccgctcgatatgcacgtacgccatcaccgccccaaccatcaccgacgcgatggaagtgaccaaggtcttgggacgcgcgccccgaacccacaagccgatagacataagcaatccctttcatatataactctggctcccctctctgaggggagccagagtatgcctaatcagccaacgagcggcttgaccagcgggaaggtgatggtctcgcgaatcgtggcaccggtcaaggcgataagcagtcgatcaatgcccatacccataccgccggccggaggcatgcccacgccgagagcctcgaggaagtcctcatcgatgtcgcaggcctcttcgtcgccggcgagtgcgtccttggcctgggccacgaaacgctcacgctgcacgatcgggtcgttgagctcggagtagccggtagccagctcgaagccgcgcacgtagagatcccacttctccaccacgccgggcttggtgcggtggcccttgaccagcggggaggtttcgaccgggaagtcacgcacgaaggtgggctcgtaaagcttgtcctcgtagaagtgctcccacaggtgttcgacgagcttgccgtggttctccacgtcgtcgcgctccacgccgagcttgtcggcgatggcgcccaaatgctcaacggaggtgccgggatgctcagggccgccgttcggcacgatttcctcgcccaatgcctcggacagcgaatcgtacatgctgatggtcttccattcgccgccgaagtcgtattcggtgccgtcgagcagggtgaccttgtgcgagccgtagacgtccatggcggtcttctgcacgagctccttgaccagctggccgatggaatcataggtgccataggcctggtaggcctcgaccatggtgaattcgggggcgtgcgtggcgtcgacgccctcattgcggaagtcgcggttgatttcgaacacgcgatcgatgccgccgaccaggcagcgcttgaggaacagttccggggcgatgcgaaggtacaggtcaaggtcgaaggcgttcatgtgcgtggtgaacgggcgggcggccgcgccaccgtgcagggtctgcagcatcggggtttcgacctcgaggaagtcgtggtcgtcaaaggtgcggcgcagggaggccacggccttggagcggttgcgcaccatgttgcggatgttctcgtccgcgatcatgccgatgtacggcttgcgggtgcgggtgtcttcgttcaggtccttgtgcagggccggcagcggctgcagggccttggaggcgatagcccactcagtggcgaatacggacagctcgccggtcttggaggcgatgacgcggcccttgaggtacaggtgatcgccaaggtcgacgagctgcttgaactgcttgagcgagtcggcgccaatctccttcttggagatcatgccctgaatcttggtaccgtcaccggcggacagctgcacgaagcacaggccgcccgcgttgcgcaggaacagcacgcggccagcaatgccgaccatgtcttcggtctcttcgccagcctcgagcttgccgtcatacttggcgcggaccgcctcgatggtgtcggtgacgtccaagtgcaccgggtagggggcgatgccggcctcaagcatcatcgcgcgcttggccacgcgcatctgcacctgctcggggtgagccagcgggccgaactccttgttggaggggtccacggcttcgtccagcgtggcaccggacttgatcttctcgcggatggtggcgtcctgctcgagcagcatttccgcacgttcgacggtgctcatctgcgggacggccggggtttcattctcagtgttttcggtattttcgacaacttcagccatgattcatcagtgtacgcaaggccggcgattatgagcccggcagaccgtacggccatctgaacacccgctcacatgacgcaaaaccggctctgcacaaggcttgagagacctgtacacacggcgaatccaccatcacgcaacactcgcgacatgccgatttgcattgtccaccaccacaatgtaatatctacgtctgttgccaaacgggctgtagcgcagcttggtagcgcgcttcgttcgggacgaagaggccgcgggttcaaatcccgccagcccgacaactggaccggattgttgagaaatcagcaatccggtttttcgtttcctaacccaacaatcagaccaagcgatcggacagcggtaaacaacccgccgcgcacagcgacaaaccgcgtcgcggcaaggcccgtatttgttggcggaccaccgtaatataaatatatcgctcgaatcaatcgattgccgcactgtttttgtaagtaatactgaagtaattagaggaaccatgaagaagagtctgcttgcactggcttcgggcgcgttcattctcggtgccgccgagttcgtgatgatgggtattctgccgcaggccgcggccgccaccggcgtgggcatccccaccgcaggccattacatttccgcgtatgcgatcggcgtgtgcttcggcacactgattctggtgttcggccgcaaggtgccgccgaagaacctcatcatattgtttatggcgattgccttggtaggcaatctggcttccgtgttttccgtcaatgccgccatgctggtcgtcgcgcgattcgtcgccggcctgccgcacggcgcgttcttcggcacggccacgctcattgccaagactctggcggagaaaggcaaggaagcgcaggccgtatccgtgatggtcaccggacagaccgtggccaatatgctcggcgtaccggcgggcaccctgatggccgagttcctttcctggcgtcttgccttcggcattttggccgcttgggcggcaatgacgattgtgctggcgttggcgtggattccgtacgttgcaccgattaaagacgcgggcatcgccggtcagttcaagttcctcacccgccgtgg

SEQ ID NO: 3006 - DNA, 9574 bp, Unknown
  R19_24m  MAG No. k141_13515
tcgctggaggtcacgtcggcctggaagtagcggtccttggagtaggacttcttgccgcgcggggccatggcgccgagggagcccatgccacggtacagcttgtactgcttgccgtgcaggagcaccttctcgcccggggcttcctcacagccggcgagcgtgccgccgagcatcacggaggaggcgccggccacgagggccttggcgatgtcaccggagtagtggatgccaccgtcggcgatgcagggcacgccagcggcacggcaggcctgggcggcctcgtacacggcggtgagctgcgggacaccgacaccggcaacgatacgggtggtgcagatggagccggggccaataccgaccttgacggcgtccgcgccagcctcaatcatggcctgagcaccggagcgggtgccgacgttgccgccgatgatctgcacgccgtcgaaggcggagtcgtgcttcaggcgggaaatcatgtcgagtgccagacgagcctcaccgttggcggtgtcgaccacgagcacgtccacgccagcctccatcagagcggaggcacgctgccaggcgtcgccgaggaagccgacgccggcggccacgcgcagacgaccctgctcatccttggtggcgtccgggtactgctcggtcttgacgaagtccttgacggtgatcaggccggtcaggtggccttcctcgtcaacgagcggcagcttctcaaccttgtgctgagcgagtagacggtgagcgtcgtccttggagatgttggacgggccagtgaccaggttctccttggtcatgacatccttaaccttcagggtgtcgtaatcctcggaggcgatgaagcgcatatcacggttggtgatgatgccgacgagcttgttgtccttgtccacaaccggcagaccggagatgtggaacttgccgcacagcttgtcgaggtcggccagcgtgacctcggggttgacggtcagcgggtcggtgatcataccggactcggaacgcttgaccacatcgacctgagcggcctggtcgtcgatggacagattgcggtgcaacacaccgatgccaccgttacgagccatggcgatggccatctcggactcggtcacggtatccatggcagcggagaggaccggggccttcatcacgatcttgcgagtcagatgagtgctggtgtccacttcggagggaatgacatccgtctcgttcggcaacagcaacacatcgtcataggcaaggccgagcttggcgaaaatcgggggaaggggagcatacgccgactgggcgtttaattcatcaaggtttgtagccatgtaaacactatatgaaaatgcgctgaccttcacgacacacgcttgtgagcgctcacttatccgctgccgggtcctgcacctcacccacctgcgagtcccgcgaatttgcaggcgaatcagtcatcgaatccgctgcctgagagccaatcgaatcccggctctcccctactgcagactgcgatttaggcactgtatgctgcgcgtttttacgtgcggattcgaacgtcaggttctcggcttggatctcgggaatacgatgccgcagataggggtacatcgtggctatggtcagcaccaccacagcgatggccatgcccacggccacgtgctgcgctttgaagaacagaatcgtcagcgaaccgaatgcgatcaacgcggcccatccccacagaatcagcacggcgccacgcaccgaatgcccgatcttcagcatgcgatggtgcaggtgcatacggtccggatgcatgggcgactggcctttggccaaacgccgcacaatcgccagacacatgtcgagcacaggcaggaacaacaccagaaccggcagcagaatcggcatgaacaccggcagatagatgctggcatgaatcgaggccgggtcaagacgtccggtcatcacaatcgaagcgcaggtgatgagatagccaagcagcatcgaaccggaatcacccatgaacagtttggcgggatgccaattatgcagcaggaagcccacgcagatacccaccatcatcacgtcgatcagcgtggccaacgaagcataactcggggaagaccgggcgatgatatacgaataggcggcgaacgctatgccaccaatcgccacgataccggccgccagaccatcgaggccatcaacgaaattgaccgcgttgatcgaggcgacgatcaggaatgcggtgatcgccatggacagactcggcgaggcggtaatcagcgaaccacccaaaggcagtgagatgatctgcaatccgtcccaagccacgaatacggaaatcagcagctggccggcgagtttcagcatccaatcgagatcccacaggtcgtcggccatgcccagcagactgatcatgatgccgccggcaagaatcacccacatctggtaattgccgttgaacaatcccgagagaaaaggcagccgactggcgaatacggtagccacggcaaaaccgatcagcatgccaaggcctcccatgcgcggcgtgggaatggtgtgcacgtctcgggcacgcacctcgccaaccgcaccgatttcgatggcgacgtggcgaatcagcggagtcaccagccaggtgacgccaccggcgatggcggcaatcagtaggtagattctcatgcgccgagtcccccgccgttgaggtggagggccttgcgaatcacgttttgggcgatgacgccttcacgcaggatctcgatgccgtcgcgcgcgtacggatcggctttgacgacggtgctggagacatggccttgggtgggaccgccgtccagatacaggtcgacttcgttgccgaacgcgtcaaccgcctcctggacagtctgtgcgctttcgtcgccggaacggttggcgctggacgcggccagcggaccagtggccttgagaatcgcgaggcacagcgccgaattggggatgcggatgccctgcgtgccggggcgaccatcggcggtgtcggccaaagtctccaacgtgcagtcgggccgggctacggcaatcggcgagaacgcgccgggcaggaacgccgccgacaaacgattcagtggagacggcaggtcgagaccgagttcatcaagctggtcggtggatgcgagcagtacctgcaacgccttatagcgcgggcgacgcttgagccggtagatacggtcgatggcggccttattacgcggatcgcacgccactccatataccgtatccgttggaatgacgaccaatccaccatcccggatgacacgcgccgcttgtgccagcgattcatccgtgactttcagcgttgttccgccctccacgctcacgacacctccgttcgcctgtgtattcacaatctaccattgcaccattgcgccccgacttgcatagttcatcatcgctcgtttgccgtactgctgttttccgattcgccccatacgcacagaccgtagatacaatgagttcatccatgctctttcgcgaaattacaggagtgttcaatgagcggaatcaatgctgaatccaccaccatgcctcccgtcgaactgcgtatgccgcgcgccagcgagcgcgtgttcgccaacttcaacttcactgtgctggattgttgcccggtgacgattggcgagggttgcgtgatcggtgccggctcggtggtgacgcgcgatattccgccgcacaccgtggccgtgggcaatccggcccgtccgattcgcgaaatcacggacgcggacgcctccgccctgcagtattacgcgcagtagcagcggcggccccgcgcctgtggctacttctcggcgaagagatagcggtctcggccggtccaatctttgccggtggaggcggtggcgaaacctgtggccttggcataggccactaatcgctcgccttgggtgagatcatgctccataaccaatacgccgccgggcttgagcaggcgccaggcgcgctcaataatgcgttcagggatgagcgtgccgtctgccgaaccgccgtatagcgccagttccgggtcccagtcgcgtacttctggttgttcggggatgtcggtttgtggcacgtagggcgggttggtgatgacgatgtcgatggtgccgtcgagttgcgccagcgtggccagtgacgtggcgtcggcgacttccagttggtaattggaggcgatggaggggtatcgtttcgcggttaccgccagattgcgccgggtccattcggcggtacgcggggataattcgacggcccatacttggctgccgggcacttcgctgactatcgacaggccgatggcaccggaaccggcgcacaggtcgaccatgcgcgggtggatcatgctgtgccgggtcagccagtcaagaccggcctggactacggtttcggtttccgggcgcgggataaagacgccggggcccacctgcaggtcgaggtagcggaaaggcgtgtggccggtgatgtattggagcggctcgcgtttggcgcgtcgggaaagcatggcgtggaaggcggcaaggatattggtgacggggtcggcctgaccacccccagtcgctgcgcgacagcccccgccggcgggggccagcgaatcgaggccctcccccatcagcatggccttgtcgatatcgcgtagctcggcgtccacggcctcggccagcaacagtttggcatcatgttcgggcgtctcgatgccggcttcgcgcaactgcgcggcggcttgacgaatcaggtcggctatcactgctggttggccagacggtcggcttcgtcggcttggatgtcggaatcgatgacggcctgcaggtcgccatcgagcacggcgtcaaggttgtaggccttgtaattcgtgcgatgatcgacgatacggttttccgggaagttgtacgtgcgaatacgttcggagcggtcaagcgaacgcacctgcgagtgacgcatgtcggcggcttcggcggcctcttgctcatgtttcatggccagcaggcgagacttcagcacacgcagcgcggcggcgcggttctggatctgcgacttctcatcctgcatgttcactgtgatgccggtgggcaggtgggtcatgcgcacggcggaatacgtggtgttcacggactggccgccggggccggagctcatgaagatgtcgattttcaggtctttcggatcgatctcgatctcgtcgtcatcctcgtcggcttcggggaacacgatgacgcccgcggcggaagtctggatacggccctgcgattcggtgacggggatgcgctgcacacggtgtacgccgccctcgtatttcatcgaagcccacacgccgtcttcgggagcgggcgtgcccttggcgcggatggcaatctgtacgtccttgacgccgccgagctcggtggtgttctcggactgtacgttcacgctccagccacgcttctcggcgtaacgggtgtacatgcgcagcaggtcgccggcgaacagtgcggcttcttcgccgccggtgccagccttgatttccatgatggtgtcgcgtgcatcatccgggtcacgcgggatcagcgcggtacgcaacttctcctcggcgtcgggcagttcggcttcaagacgcttggcttcctcggcgaagtcggcgtcctcgccggccatctcctgagcggctgccagatcgtccttcacctgcaaccaggttttgtaggcgcccacgatggcacccagttcggcgtgacgacggcccagcttgcgcagcttgtccgggttggacacgacttcggggctcgccatctgttcttcgatggactggtactcctcaagcgcggttgccgccgccgggaactgttcgtctgccataacacgctttctttcgtacggtggtgtctattcggttgtgcaggtcaaaaaaatgtcaaagaatacaaaaacgccagtcctcgatcgggtatgccggagcatgccgaatcgaatcggactggcgtgaagtatgctacttgctcttcttgccgtagcgcttctcgaagcgagcaacgcggccaccggtgtcaagaatcttctgcttgccagtgtagaacgggtggcactgagagcacacgtcaacgaacatgtgatcttccttgccagcggtgcgggtcacgaaggtgttgccgcacgagcacgtcacctcaacggggtggtaatcaggatggataccctgctgcattttacgtctcctatggattcgggggacccgggtcgtcatgcccctatggcaggacgtgaaccggaacctaagggattgtacgcgcctatctggacgtgaagacgcgctgtgccgccgcaggaggcgacgcaaaagagtggggccgcaggggcttgaaccctggaccgggcgattatgagtcgcatgctctaaccgactgagctacggccccacattcgctgcgtaaaacagccaacttgcaaagtgtagcatgaacccaccaacgccggcacacgcgccatgcacccatgccatgcacccgccagcacaacaagcagcatctcccggcgctacttctcccccatgtaccccaacgggttctcgatgaaccgtcgcaagcccatttcggccgcgccatatagcgagggatgcagcgccaccggcggcacgaacacgcggatcttcacattcgggtatcccagaatttccgaacgcagccggccttcaagcacggtggccagctcgtcgccgaagtgcgtccacagtccgcccaacagcaccgtatcgacatccaccagattcacggcggaagcgatggcggaaaccagcgcatcagcggcctgatcgaccactttggccacgtctggatcccccgcacgccaacgctggaggaatgtatcgatggcctcgctgctggtggcatccccatcctcggcaatgccggcagcctcgaccaaggcgcgacggcccgcaaacgcctcaaggcacccgtggcgcccgcagctgcacaacggcccatccatcgccacggacagatggccgatctcgccggcgaatccgtgcgagcccatcaccacttcgccgtcacgcaccaccgcgccgccgatgccgatatcggtagacaggtaaataaaggaatccgtgcgatccaccacattcaggaaggacgcacgttcggtggcataccccggaatctgagcgatggcggccatcttcgcttcgttaccggccaccacatccagccggcgtaccacgttgaaccgggtgaggttgacgttttcccaacccagattgcgggccaccaacagccacatgtcgtcggtgacgatgcccggcagcgcaagcccggctcccaccactttgcagccacgtcgtttgagtcggctttccaacgggaaggtcatcgcatcgagcttggcgaagatctcgtacgggtcagtgccggtcatatcctcactcacccactcctgaccgagagtgtcgccgttcagatcgagtgccaggcaaccgtagccatcggtgttgatctgcaggccgatgccggcgatggacccgccatgaatctccagcggcgtgctgggccgcccatatgtggtggagacgaccggctcgccttcctgcaccacgccactatcgatcagcatcgaggccaacagcgaaagcgtggccttggtcaggcccgtttccttggccaagtcggccctgctcatgggtttctccgcgcgcaacaaagtgtcgagaaccaccgacaaattatggttgcgcagatcctcctgattgatcctgcgtagacttgccataggctcctacctccttgcacccctagtctcgaacgccgcacaggcgctcacatccgtctatcgcacaatgatattgtgcgtcaaacgattgaaccagatacgcaccctcgcgtgtttccgtttgcaatcatacactgcaatacagtatagtttaatcgtctaacttattggttgtggcgcgccgaaacttgcaagcgcgaccctcatcgaggaggaatgcatgacgaaagtactggttgccggcgtagatacgtcaactcaatcaacaaaggtccgcattacggacgccgccaccggcgaacagattcggttcgggcaggccaagcacccggatggcacctcggtcaacccggaattctggtgggaggccttcaccaaggccgccgagcaggccggcgggcttgacgatgtcgcggccctcgcggttggcggccagcagcatggcatggtcattctcgacaagcagggcaacgtgattcgcgatgcgatgctctggaatgacaccagttccgccccgcaggccgccgccctgatcgacaagctcggtgcaactccggccgagggcgacgaaccggacgacgtgaccgcccgcggcaagcagcgctgggtcaaggccgtcggatcctcccccgtcgcttcctacacgctgaccaaggtggcgtgggtggccgagaacgagcctgagaacgccaagaagattgccgccgtctgtctgccgcacgattggctgagctggcgtatcgccggctatggcccggtggccgagggcgaggacgctcatctcgaagccctgttcaccgaccgttccgacgcttccggcaccatttactacgatgccgcgcatgacgagtaccgccgcgatctcatcgccatggtgctgacccccgccgagggcgaggaagccgccaaggcccacgccgacgccattgtgctgcccaccgtgctgggcccgcgtgaggcagccgccgtcaaggccgaccccgccattgccggcaaggacgttgaaggcggctgcatcatcggccccggcggcggagacaatgccatggcctcgctgggcctcggcatggccgtgggcgatgtgtccgtatcgctcggcacctccggcgtggccgcggccatcgctgaaaacccggtgtacgacctgaccggagcgatttctggctttgccgactgcaccggtcattatctgccgcttgcctgcaccatcaacggttcgcgcattctggacgccggccgcgccgcccttggcgtggactacgacgagctggccgaactggcctttaaggccgagccgggtgccggcggcatcaccctggtgccgtacttcgacggcgagcgtacgccgaaccgtccggacgccaccgcctcgctgactggcctgaccctgcacaacaccaccaaggagaatctggcccgtgcgttcgtcgaaggcctgctgtgttcccagcgcgactgcctcgagctgattcgttcgctgggtgccgagatcaaccgcatcctgctcattggcggtggcgcgaagtccgtggccatccgcacgctggccccctcaatcctcggcatggacgtgacccgtccggccaccgacgaatatgtggccatcggcgccgcccgtcaggccgcctgggtgctgtccggcgaggccgaaccgctgacctggcaactcaccatcgagggcgtggagaccggcgagcccaccgaagccgtgtacgaggcatacgccaaggcgcgcggctgatacgctgccagcacaatccatgagataacaactgaataacgattcctgatgaatgccgccatggcaagcatcgcgaagagccgctgttataccgcgctcctcgctgaagcacacatggcggca

SEQ ID NO: 3007 - DNA, 5691 bp, Unknown
  R19_24m  MAG No. k141_13783
cggcctcctcggccgggaattccttgtcggcctcggcttcctgctcctcctcggccacgtcgcccgtggtcttgttggtgcccggaatcagtgtgccggtgccggcgtgggccttgacgatcaggaagccgtcaaacccaccctcgatgatatgcggttcataaccgatcttcttcgtgtattccatggtcggatggtcgtacggcaccagcacgcggtcgttctcgaccttgagactcaggtggcggttgcccagttcgaagcacaggcgtcccatttccttcatcgagttaaccggaatctcaatcagctgtgcggttttaatgcgtgcgaaatagcgcttgtcttcggtttcggcgagcacatcgccatccttgatggtcttgccaaccatgatgccgaactcggtgccgtcctcggccaccttgcgcatgcgcttcttatcggtttcgaaccagtcgaaggcaatcgacacattaagtttgccgtcgctgtactgctgactgatgatgttgccggtgatttctttggcgatcatccgttctccttggagaaaattgcttgtggcgtgagaatccccacgtccttcatgccacagtgtagagagcctgttgcgtcactttgtaacgaatgatcgaaatatgcaaaaaatatagcggaaaaatatccgaaaacacggaaaccggatatatggtacacggtgtgtcgctagtaattgcaagctattttgcatggttgtgcattagacgaatcacagttgtgatattacatatcacgttcctggagcgggaggttgtggtcgagctccgaaatcaacaaaaagagggaagttggatataatcgaagtacctgacaccgtcacattggcgatgcacattccggataatttcatttcgccgtccaccggggcgttgttctacgtcatcatgattccggtgtgggtgctgtgcctacgctacgtgatccgcaacagcacgccggagaagatggcctacctgggcgccggcgcggcgttctcgttcctcatcatgatgttcaacgtgcccacgcccggcggcaccaccgcgcacggtgtcggcggcgcgctgatcgctctgctgctcggtccccagtacgcgacggtcgccgtgtcggtggccctgctgctgcaggcgctgctcttcggcgacggcggcctgatcacgctcggcgccaactgcttcaacatggcgttcgtgctgccgtttgtggcttacggactgtacgtgttgctacgcaaggtgctgcccgacggctggaaggaacgcgtagccgaattcgtgtccggctatatcggcatcacgctcgccgcattctgcgtggcgctggaactcggcgtgcagccgctgctgttcaaagccgctgacggccaggcgctctacttcccgttcacctttaacgtgacgattcccgccatgctgatcccgcacctggccgtagccagcgtggtcgagggtctggtgaccgtggtggttgtcgaattcgtgcgccgcaccgcaccggagattatcgaagacaatgcccgtgtgaacttcgccgagaccgccggtgctgacggcaaacaggtcgcgcacgccggactgcgcaagtctgcgtggattgcgctggccgtggtggcggtgctttccccgatcggcctgctcgccaccggcgacgcctggggcgagtggggcgccgaggacttcatgagtgccacggggctcaactacgtgccgcagtacatcgcccatggcttctcgtgggatgcgctgttgcctgactactcgctgcagggtctgccggacatcgccggctacattctctccgcagtgattggcatcgccgtgctcactatcgtgttccgtctgctggcgctcgcggtgagcggcaacggcaagacatccgcgcgttgacgatacctgcatggatgcgtgagtcggaggattacgatcctccggctgacaagtcatccttcatcgaacacaacctggggcatttcggcagcgtactcgagcaggttggtcatgcgttgccgattgagtcgagcccggtcgacaaggtgctgggctcggtcaatccgggcgtgcggctgctgggcatactggccgcgattgtctgcgtcaacatcacatgcaacatgctgttctcgtacatcatgctggcggtggtgctgctgatgatggcaacccggccggcgcgcctgatgaaggcgttgctcggcccggtgctggccgtatgcatcctgagcctggtcgtggcggtgccgagcctgctgattgggcagtacagtgcgccggtccggctggtggtgcgtgcgttcgtggcggtgtcgctggtgatcgcactggcgcgtacggtgccgtggaatcgcctgattgccggactgcgcgcagttggctaccctgattcggtgatttatatctgcgacgtgacgattcagttcatcgatattctcggtcgttcgatggtggagttgctggatgcgctgcggttgcgcagcgtgggccgcgaccggaccaagctgatgtccgccggccagttgatgggcgcgctgtttctgcgtgcgaatacgcaggcgcggcaaatggctgaatcgatggtgtgccgggggtttgacggtacgtatcatatccaccacgagcgtctgctgacgtggcgcaacggggtgtatgccgtgtgcattgctgcaatgattgcgctggcggtgtattcgggatgagggtggttcgaatgaatggagcccaataatgttcggattaaagcgtaatcataaacaaactgcagccatgcagccagataactcatggttccgcggcgacccgctggtcgaactgaatcacatcgacttttcctataaagattacggcgacgccgacgatgaaacctcgtcgcacgccgtgctacgtgatttttcgctgaccgtcgaacgcggtgagcgcgtggcgctgctcgggccgaacggcagcggcaagaccacgctgatgcgcatcatcaatgcgctggaatttccggactcaggcgagtatcggtttggcggtactccggtggttcgcgaggaagtcgaggagaaaaacagtctgttcgccaaggcgctgcatcagcgcattggattcgtgttccagagttccgacacccagctgttctgcccgtccgtggaagaggaaatcgcgttcggaccgttgcagatggggctgccggatgccgaagtgcagcagcgggtcgatgacatggtggcgttgttcggcttggatcggctgcgggagcgtgcgccataccgcctatccggcggtgagaaaaagcgtgtggcgattgcctgctgcatgtctctgaacccggacttgctggttttggacgagccgaccgacggcttggacgagcgcaatactgacgtagtggttgaggtattacgcgccttcactgatgccggcaagactgtactgttctccacgcatcaccacgacatcgtggagcggctcgacgctcgcatcgtgcgcgtgcatccgtcactatggcaatgacattcacgtggcgtctattggatatcttcatcgaaaaaagcagaaaggcatcggcgaggatcgcgagtccggcgagaactgcgatagtcgctttggtgatggttgccttcatgagagtttccccaaggtgttgacgttgatttcatgagattcgaaaaagagcgtatctaggccgaaccggacagtaagtcaacggtttctggaaaccagctgaaaaagctacggtattgtgaaatatgtctcatcggaatgggtcaagtttggcctagcgctcgcagtcgtgcgcgaagattcgttggattgattctcggtggattaagtcataggaagaaactagacaccttgcggtgtaaaaccgggaatcagaatggtgtaaaaccgggaatggaaatagtgtaaaatcgggaatgagaaaggtgtaaaatctatattgaggtgattgggtagctgagaaaggccggaaaatgaacgatttgaacaatcgtagtgataccttgactcaacctgattatcgtgctcgcgtggtcgatggcaggttaggtaagttacttaaagcattcggcgcggtggaaatcgtcgggccaaaatggtgtggaaagacatggacggcgctttcccgctcgcgaagtatggatcgtctggatgatgccgctacctttgcggccgcacagactgatccggcattggtactcatgggtaatgaaccgcatttggtggatgagtggcaagatgtgccgcaaatttgggatgccgctcgtcgtcatgtggatgacaatgcgaatcgcaaggggcagctgattcttacgggctcggccattccgaaggaccgagaaacaattcaccacagtggcacaggtcgaatttctcgcttgcgtatgtggcctatgagtctgtgcgagtcagggcaatctaccggtgtagtgagcttgtctggtttgtttgatggacaattcgagcctgccgaatgtgcaaccagcattgaagatattgccagatggtgctgtcgaggtgggtggcccgcaaatcttgatttggatgacgagtttgctctggaaattccgagtgaatatatcaagagtgtgcttgatatcagcgtgcccaagatgaacaagaaccctgaaaccgcgcgtgcactcatgcgtgcgctcgccgtgaacgtatcgcaggcaccaaaatatgcgacgctggctgcggatatggcctatggcgatgagcgccgtgaaccggatacgcagacagtaaagagctatttgggaatgctcaaggacttgtaccttctgacggatttggagggttgggagccgccactccgcgcaaagagtcgtgtgcgaaccaagcccaagcgatatttcgtggatccttcgttgcctgctgcggttttaggtgccgcgccgaatactctgatgcgcgatacacagacgctcggcgatctgtttgaaacgctgtgcattcgtgatttgaatgtatatctgtcggccatgccgggtgcgaacaatcgcatcgcctactaccgcgatgacaaggggcttgaagttgatgtcattatcgagttgtctgacggcaggtggggtgccatcgaaataaaactcagtgaccttaaggtgaacgatgacaatgcggataagctcaaatccttccgcaacaaaatctgcggcaatcccatggcccaagttcgcgaaccagagttcatgatgttccttaccggccgaggtgggaaggcctatcgccgcaatgacggcatactggtcgtgcccatcgcaacgctcggggcgtgaatctggtaaaagaagagaagcgccgaaccgcgaaagcgcctgtcggcgcaagggccgctcgcggcggcaaaaaatggagcccggggcttaagcacggtccgacgcggatacttagtatagcttgcgatgggtctcgccgcgccggggaaggggtggtgttggccggtagctgattgttggggtgcggtcggtggatttctccctcagtcatgggcatcgcccgtgacagctccctcatcagagggagcctggagcggggttactccaaccgtccgcgacgccagaggttggcaccgtgctggaaatccttggcggtggccatgaggctgccggcggtgtgcataaggcgggcggctttggtgcgtacggccttctcatcggcatccgaggagaaggcgccg

SEQ ID NO: 3008 - DNA, 4475 bp, Unknown
  R19_24m  MAG No. k141_13952
aacaatgcgatcagcgacgagtacccggaaggtattttccatgcacaccccgaatactggccggtcaagcaggagccgattggactgatcgaagcccaaggcctgttcatcctgcccggacggctcgtcgaccagctcggcatcgtcgaggaggcgctcgccgaaggccgcgatttgcccgatgaagtcagcgaattcagtctcgaatggggcgaactcgctgaaacattggccggaaaccgcgaccgcgaggccatccaccaagccgtacgtgacgagctcggcagcgtctgctaccgcatcctcggcaacacggccgtcttcaagcagaaagccaccacgcaaacattcctcgaaagtcttggttttgccgctaggtgaaacaggtcaagtgaagtaagctcaatactgaaggaaaaccgaaggcaagtccttccaaaggaggagatatgactactgttctggttacgggcggtgctggattcatcgccacccacaccgacatcgaactgctcgacaagggctacgacgttatttccgtagataactacggcaactcgtctcccgtggcgcttgagcgcgtcgagcagatcaccggcaagccggtcaagcgttacgacggtgacgtgcgcgatgaggcgcttatggaacgcgtcttcaccgaaaacaacatcgattgggtcattcacttcgccggtctcaaggccgtgggcgagtccgtggccaagccgatcgaatactacgacaacaacctgtactccacgcttgtgctgctcaaggtgatgaagaagcacaacgtcaagaagatcatcttctcctcctccgccaccgtgtacggcacgccgaaggaactgccgatcaccgaggagacgccgaccggcggcaccaccaacccgtacggcacctccaagctgttccaggagcagattctgcgcgacgtacatgtggccgatccgtcctggaccatcgtgctgctgcgctacttcaacccggtcggcgcacacgagtccggcctgctgggcgaagatccgaagggtattccggcgaacctcaccccgtacgtggccaaggtcgcggtcggcgagctcaaggaagtccaggtctacggcgacgactacgacacgcccgacggcaccggtgtgcgtgactacatccacgtggtcgacctggccaagggtcacgtggccgtcattgaccacatcgacaaggaaggcgtgttcgtctacaacctgggtaccggccacggctactccgtgcttgaggtcatcaaggcttacgagaaggccgccggtcatccgattccgtacacgatcaagccgcgtcgccccggtgacatcgccgcctgctacgccgacgcttccaaggcggagaaggagcttggctggaaggccgagctgaccatcgacgacatggccgcctcctccctcaactggcagaccaagaaccccaacggtttccgcgacgccgagtgatatgagcagatgagctccctctgatgagggagctcatctgtcgtttatcacacaatgcgcctatcggcggcccagcgggtgagctcggtgcgattcgaaagctgaagctttcgcagcaccgagctcacgtgcgtttcgaccgtcttgatcgaaatgaacagttcggccgccacctctttatacgtgtatccgcgtgcgatcagccgcatgacctcctgctcgcgggcggacagccggtccagctcctcatcatgagcccgtgccgcaccatcagcgccgccatcagaccccgccgccggcacaccctgaaaggccgaaagcacaaaaccggccagttttggcgagaacacggcatagccctcatgcacctgcttgatggatgaaatcaaatcagcgccggtaatcgtcttggtcacatagccctgggcgccggcgcgaatcaccgcccccacatcctgcggcgcatccgaaaccgacaatgccagaaacacggtggtaggggagtagggccgcgatttggcgaggatctcggcaccgccgccaccttcaccgccgggcacgtgcacatccagcaacaccacctgcggcttggtctgtgcgatcatcgccaccgaaccgggcacgtccgccgcttggccgacgatatcgaaggaatcacgcaacgtggcgattacgcccgcacggaacatctcatggtcatcgaccacggccacacgaatcttggctgtctcattctcgctcatcgatgttctccctgcgccgctttcagcgcgatcggcatatgcattctgacctcggtgccccagccggccctggacactatctccactgtaccgccgcgccgtttgacgcggccgataatcgattcgcggatgcccagccggtcgggcggaatggcgtccatatcgaagccttcgccatggtcgcgcacgaacacttcaaccatcgtgtcgctggcctcgcaatacaaagacaccggctcgccgccatgcgtgaccgcattgaccaacgcctgacgggtggcgtccagcagcgcatcggtctgggcgctcggccgcgcgtcgcccacggtgaccacctcaatcggtttgccgtgctcgtcctccacctcggcggcgatctgcttcaatccggctcccaccgaacgatccgatgtggaacgttcctgatacagccattcgcgcagctcgcgctcttggctacgcgccagggcgaatacggtggtcggttcctcggagtgcagctgaatcagcgccaacgtttgcagcacgccatcatgcagatgggcggtcatgtccgcgcgctcctcttcgcgttccttcaatgcctgctcgtgggtgagtcgttgcagcatcgcgttcgcccacggcatcaccgccaccacgataccgacgatcatcatgaatccgctggcaacaatgcgtcgaggagaggtgccccacccaggaatgctgacattatgcacatacaatgcccatcccatgaaaatcagtgcgatgccgcccaacatagacaacagctgcgtgcctcgcggactaagattcatccatgccagtgcgatgccgcccaaccctaccagcagcggaagcacaatctgggcatccgcaccggtgctggtgagcagcagtccggtggccatcaacgcgaaaccggccaatgccacgacggccggtttcggagcacgttggatggcttcggacaatgattccggtgcggcagccgattcgtcgtcatgagcggcaagtggctgattgcctcgcgcaagcggcgcctgatcaacgggcactgtgcgagctgcagccgtcaccgggtctccggcgggcatgaacacccacaggaatacataagcgatgatgcctgcgccgtagaggaaggtcagtgcgatgaacgcaatccgaatccatgccacgccgatgcccaagtgcagggcgatgcccttgcacacgccggtgagccagcggccctgccgggggcgcatcagcggcatgcgcgcgggcagcaatggttcgggagatgacgtcatactcctattgtgccgcgctcagggcgttgcggccggggttttacccggtgttcagggaacaatcagggtgttccccgagcgttgtggcagtggacgggcggtgtaatggaatcatgagcaatccaaacgcgaatccgtatcagccacagccgcagcctggtccgcaaaaaaacaagacatcgcgacgcttcttcacttgggtgcgatccagtggactggttcgcggcgacgaccggtggatcggcggcgtatgcagcggcatcgctttacggcttggctggagccccacactagtacgtgctttggtgattgtatgtacattgttcttcggttttggcgcagctctgtacgcactcggctggtttctgatgccggatgtacgcgatgggcacatcttggccgaggacctcattgccggccaatgggactggaattgtcttggatgcttcctgttcctcgccgtgacaatcgtgattccaggtgcggggtgggtttgtattgcgctcgccgccttagcgctttggttgttagccaaaagcggcattcgccagcaggaagggtacggattcagggcatctgcgccgcgaccggtttcacagcctgtgtcatatccagctccacagcctgtctcatatccagccgcgcaaccggtccctcaatctcctttgtattcagctccgcaacctgtttcacaatctgtttcacgaaccgcgcctagtgtttcacaacctgtttcacggcctttctgtcagtcgatgcccggcgcggtgcccggcgcggttcccagcacgatgcccggcacagtacccaacgggccgtttgcccccgaccgtatgaatgcgacggcttatgcccccaccgagtccaagcgccgcaagccggcgggcccaatcgtggtcttgagcatactgggccttaccttcctctcctttgccggtctgatgggactgatttgggtaaacgacatgggcattatcggc

SEQ ID NO: 3009 - DNA, 26076 bp, Unknown
  R19_24m  MAG No. k141_14009
cacgtaaccgttcggcaacacaccagttgaaggagcgacgatgactaccacactgttcaccaacgcacatatcgccaccggagaacccggcagcacggctgcaagcaccctgccattgcaggacattctcgtcacggatggcgtgttcaccgcattcggccccggactcgcgcaacaatatgaggctcagggtggtgatctggcggccattgaggtggtcgatctgggcggcaaacttgtctgcccaccgttctgcgatacgcatctgcaccttgattacgtattcacggcccgcaagcccggtgcggtgaatgaaagcggaaccttgtttgagggcatccagcgatggagtgagaccaagtccgacttgacggtcgacgagatcaagcagcgcgcgaaaatcggcattaagaaagaaatactgcatggcgtgcagctcattcgctcccatgccgatgtgaccgacccgaacctgacctcattaaaggcgctgctggagcttaaggaggaattgaaggatacggtcactctccagatcgtcagcttcccgcaggagggcatgtactcctacgagggcccgcatggcgaatcgggggccgagctggtggaggaaggactcaagatgggtgccgactgcgtgggcggcatcccccatttcgaacagtgccgtgagtttggcgagcattccatgcacacggtagttgagttggcttcgaaatacgacaagctcatcgacgtgcattgcgatgagacggatgatccgaattcccgttacgtggagctgctttcggcgttggcatataaggctggcattggcccgaaggtcaccgccagccacacctgttcgctgggatcggcggacaacgcctacttcttccacctgaccaagctgcttaaggcggcgcatatcaacttcgcctgcgcccccaccgagaacctgtatttgcagggccgtcaggataccttccccaagcgccgtggcatcacgcgagtcaaggagctcactgaggcgggtgtcaatgtgtcattgggccaggattcaatgcaggacccgtggtacccgctgggcaatggcaatatgatgctcattcttgattatgtgctgcatttggcacagatgatgagctttgaagaaatcgacgatgcgttgaagttcctgaccgtcaacggtgccactacgttgggcctgcgcgatatgtacggcttggaaacgggcaagccagcaaacttcattgtgctggacgccgatagtgtgttcaacgccgtgtatgagcgctgctcggtattgcgttcggtgcgcgccggccgcacgctgtttacccgcgaggagaccatcgacaccggactcgccctgctgcaataacccgacaacaaacagtagttccccttgacaggggagctatcgccagaggcaactgaggggtagaccaaaaacgtgcacattatgtgtgcgtaggtctacccctcagtcagcttcgctgacagctcccctgtcaaggggagctttgctggtatgcgctagctacgctatcgaaacggactacttctgcggagcgtcaccggaatcggcgggagcggattcggctggttcagtggccggagtggcgtcggctggagtctcgccatcagtggaggcaccggcttcggacgaagtttcggcatcggtggcggcaccgtcttcggcgggcttatcggcggcggccggctcctcgaacttctcccccttgaaggtgaattcgccgaggataccctcgccttccgcatccacaatcacgcgctgaccgtcttcgagatcgcccatcagaatcttctcggagatggcgtcctcgatgtcgcgctgaatcacgcggcgcagcggacgggcacctagcagcgggtcgaagcccttctgcgcgagcaggtccttggcggcgtcggtgagttcgagcgacatgtgacggtcgaacaggcggtcgttgagctgcttgacgtccagatccacgatctggcgcacctgcggctcggtgagctgcttgaagacgatgatgtcgtccagacggttcaggaactccgggcggaactgctgcttcaattcggagctgacctggtccttcatgcgctggtagctggactcgttgttagcacccaggttgaagcccgtgttggcggccttggcgatgtctcgcgtaccgaggttggtggtcaggatgatgatggtgttcttgaagtccaccttgcggccctgaccgtcggtcaggtggccgtcatcgagcacctgcagcagcgtgttgaagatgtccggatgagccttttcgatctcgtcgaacagcaccacggagaacggcttgcggcgcaccttttcggtaagctcgccgccctcctcgtagccgacgtatcccggaggcgcgccgaagagtcgcgaagccgcgtacttctcggagaactcggacatatccacgcgaatcagcgcgtcctcatcgtcgaacaggaattcggcgagcgtcttggccagctcggtcttgcccacgccggtggggccggcgaagatgaacgaaccggacgggcgcttcgggtccttcagacccacgcgagtacggcggatagagcgggacagggcggaaaccgcctcgtcctggccgatgatgcgcttgtgcagttcggcttccatgttgagcagtttcttggactcggcctgagtcagcttgaacaccgggataccggtggtggagctgatgacctcggcgatcacgtcctcgtccacgaccatcttgacgtcggactcgccttcgcgccaggagtcttccttctgcttgcgatcggcttccagcttctcctgcttgtcgcgcagttcggcggccttctcgaagtcctgacccttgatggcctcgtccttgtcggcggcgatcttggcgatcttctcgtcgagttccttgagctcaggcggggcggtcaggcgcttgatgcgcaggcgtgcaccggcctcatcgatcaggtcgatggccttgtcgggcaggttgcggtcctggatgtaccggctggacagctcggcggcggactgcagcgcgccatcggtgatggtcacgtggtggtggttctcgtaacgggaacgcaggcccttcaggatctcgatggtctcggcgatggtcggctcgtgcacctgaatcggctggaaacggcgttccagagccgcatccttttcgatgtacttgcggtactcgtcggtagtggtggcaccgatggtctggagctcgccacgagccagcatcggcttcaacatgtcggaggcacccagcgcgccgtcggcggagccggcgcccacgatggtgtggatctcatcgatgaacagcacgatatcaccacgggtcttgatttccttcagcaccttcttcaggcgctcctcgaaatcaccacggtagcgagaaccggccaccatggaaccgaggtccagcgagtagacctgcttgcccttcagggtttccggcacgtcgccggcctgaatcttctgggccaagccttcgaccacggcggtcttacccacgccgggctcgccgatcagcaccgggttgttcttggtgcggcgggagagcacgaccatgacgcgctcgatctcgttggtgcggccgatgaccgggtccagcttgccttcagcggcttcgacggtcaggttgcggccgaactgatcgagaatggcggaaccggacttgttctgcttgtctgtcacgccgccggcgttggccagatcgcccttgccgtcaccggtgccggtgccggagttgccgcgaatcatatcgatggtcgcgctcctgagctcacccaggtcgacgtccatcttgatgagcacctgggtgcccacgccttcgccttcgcgaatcaggccgagcaggatgtgctcggtgccgatgtagctgtggcccagctgcagggcttcgcgcagcgagaactccaacacctgcttggcgtgcggagtaaaggggatgtgcccgttcggagccgcgttgcccttgccgatcatttcttcaacctgcttgcgagtggcatccagctccacgcccttcgaggcgagcgccttggcggccacgccctcaccttcgcggatcaggccgagcagcaggtgttcggtgccgatgtagttgtgctgaagggtcctcgcctcttcctgcgccaacacgatcacgcgccgtgcacggtcggtaaaccgttcgaacatgcttgtccttcctcaattgacattccgtcttactctaccgattcacgatgacgtttattcatcggattccatgaattgcgccgtgagaggagaagaaaacgatatgctggttctagattcacccgtagtcgattacaaggaggctcgaaatgagtgaagctgcaaccaagcccgacatcgttgtcggtgtggatggttccgatgaatcctttgccgcgctgaagtgggcgcttgaggaggcttcgttaaccggtcagagcgtcaacgccgtgtttggctggacgcattcgtgggatatgggttccgaaccggacagcgacgaggcctgggccaaggtccgccacgacatcgccaacgagctgcgtgtgtgggtcgacaaggccgctgcaggcatcgacttcgatccggcgaatctgaagctcacctcggtgaaggcctccggcacttcggccctgctgcagatcggccatgatgcgcagcagatcgtggtcggccgccgctcgctgagccgtgtggcccgctggttcatggggtccctgtccgcttcgctggccgaggccgccgaagtgccggtgaccgtggtgcgcatcgccggcagcgaggatgagaccgtgaccgatgccatcgccaatgccctgacgccaggagaccagccggtccactacacgcagccacagcccgtggtcgaggtggctcgccgcccggtggtggttggtgtggatggttccgagacttcccgccgcgcgttcgacttcgcgctggaaaaggcacgactgcacgacgcgccgctgcatgtgatgttctgctggcagctcaaggatttgggcgttattccgggctatgagaacgccgtggcaccggtgaaggtcggtcagcgccgcgccgaggagattctcgccgggctgatggccaaggccgagattcccgatggtgtcaaggtcagcgcgaatgccttccatattcccgcgtccaaggggctgattgcggcatctcggtacgccagccatctggtggtcggttcgcgcggcctgtccggtctggacgcgcacttcctgggatcggtgtcccgtcagatcgtgaacttcgccgaatgcacggtgactgtggtgcactgatgcaccgaaatcggcatggagtgctaacgcacgtctcggtgatgggcttgcagggaggaattctttattcctgcaaccccatcaccatctactttttaggaaacatcttcgctgagacctataagttgatccgagagtacattctgctgttggggagcaggattggcgtttattttattcctcgtccgccctgttctggcgcagctgctcaatgagatcgatgacggtttcgagttcaggagtcacatcgtctgaaggacgaacgttatcctcttcgtcgtccatctcatcatcctcatcatcatcggcaacggtgttgttgaggatgtcctcttcggtggcctcgtcgtcagcatcagacttggactcgtcgctggaatcagctgcatcaacatccacaacggaatcggatgcgttctgtgcaacagactcatcaccggcagactgggattgcgaggtcccgtcgcctgccgcctcctcagcgggctcagtatcgacggcgttcccgtcaacagtcttctgtgcttcgatatcatcaccggcaggctcgcctgtcttgtcggtttcgccttcggcctcgtcctgggcaacctgctcctgcttgcacggacggttggcaaccacgtcgatatgcagatcgtcaaaggctggcttggactgcacccacagctggcttggctcgggaggttcgatttcggaatgctcaccgcagccgtggtccagggagaccacgcggccgtcatccggactccacttgttggcgcacacgccgaacatacggtcgagttcgcccgcgagcggcacgaagaaaccacaggtggagcacaggttgccttcggcggttttggtgctcaacgctttggggcctcgcggaccttcataccagcgcttggcagcctgcgcacgacccaacgaggtcagcacgtgacggcgggtcagtcggaaggtctcgacggcatcgttgacatcctgcagcgaggattcctcgacttcgccttcctcgatgcgctcgtcatccggatcggtaccgatcgaatcggtgggagccagatctgtgggctcaaggcgatctttccaaggaatccacttgggcggcatcaacgcgccctcagtggggatcaaggaggattcgttgacggtccaggagtcgatctcctcgtcgtgatacagcgtcaccgaccattgccatccttcgtagccacggatattcgcggcgaagcggaagtcagtgacgtgatcctcaagatcatatgaggtaacgaaatcccccacctgatcgctctcgtcggccacttcgagcagcacggcgcgcgcgatggcgtgagggtccggtgtcacgatggtttcggtggtatcagtcatagatcagatcagtcctgtacatcgaattgatccgccaccgcacgcagcaacgtggccagctttttgctgtcggcagcagatgggtaacggtgacggcgcaacgtattgccggccgcatcaagcatcttgataaggtcctcgcagatggcggccatgtcatccgccttcgggcgggtggccttgaccaagctgggagtggaggcgatcaggcgaacatccatggcctgcggcccacgacggccatccaccacggaatactccaccttggcccccttgcgcaacgtggtggcgccagtgggtagggcctgagccggcaggaacacgtccttgccttcctcactggtgatgaagccataacccttggctgcgtcaaaccaacgaactcgaccggtgggcattgcgaaccttccttaatcctcaatggaaatagtaaaccgaaggtacagtttacctcacagggcttgacctcacgctttgggctgagtcgcctgagtcttacgctcagagctgaaccaagaagtcttctgtttggcgtccttggttttgccggtgggccgcttgggctcaggagcgacgatctgctcaatcggcagcaccacggtgaaggtcaggcctcccccatcggtgccggtggcgcagataaagccgtgatgtgctttgaccacggattgcgcgatggccatgcccaaaccggtaccacccttttcgcgggcacgggatgggtccgcggtgtagaagcgttcgaaaatcttcgagcgcgattcaggcggcacgccggggccatggtccacgaaacgcaatacggcgtatcgatagccggtctgcatcgaggcacctacttcggcggcgtcgatgaaccgccgcattgatgcgtcgctggcgggcatgcgagcgagctgtcttggatcgatggcggccggcatcacaccgagcgcggcctcggcaggcgaatcggcaggcgtgtagcggtggatgttgcccacgatgttggtcaccacctggcgcagtcgagaggcgtcgccgggcagcacgacctcgggccaatcgccttcggcaaggttgaattcggcgggattgttcaaatcgcgcgccggttcgagggaaatctgcatgcggcgaacggcacggtccgggtcgagcgcatgcaagtcgtcgacggcgtcggtgaccagcgacgagagtttcaccgtgccggtcacatcgatgccgcgcccctcatcgagacgggccaaagacagcagatcctcaacaagaacagtcatgcgctggctggaccgttcgatatgttcgatggactcgtccgcacgctccaaggcaccaggcatatcgcgctgcatcttatacagctccgcatagccatggatggcggccaacggggtgcgcagctcatggctggcgtcggagacgaaccgtttcatcttgtcggtggtctcctcctgttcatggaaactggattctattcgggtgagcatggagttcagcgaggcggccagggagccgacctcggtgttttccggcgcggaaggaatacgttggctcaggtcgccggcggcaatctttgcagcggttttctcgatgcgcttcagcggcgtcatcgtgtgctggatgatcagcgtggacagggagccgccgagcagcaccacggcgatgccgaccacaatgcagtatcgggtgagtgtgttgacggtgtcgatctggtcggccagtgacaagccgatgtacaccacggcacggtccttgccgttttgctggaaggtcaccggcagaatacgccatggtgccctcgccgtgacgatggcggcatggttggcattgacagtggggttggccagtaccttggcgatggtgtcagaggaattggagtttccgttggccggatcgttctggctgtccgcactgtcggactgcaccgtgatgatctgcttggccactgcctgcgtagtgaatgcctggccgagcgtgatgccactggtatcaccataggtaggaagaatcggcaccgatacgataccgtcctgcatctgcggcatcagcggggtcacgaccagaggattgccctctttgtctttggtgccgtcggtatattgaatctgcagaaagtacgagttcggccccgatgagtcattttttgacagcagatcgatattgttgaccaccagctggctttgcgagcttaactgggtgtcggttttctgcagcatgtagttgttcaccaacgcgcggatggagaaggaaatcaccgacacgccgataagcagcacggcgatggtgcaggccaccagcttgctgctcaacgagatacggtcgatatgccgcatcagtatgtttttcttacgctcgcgccgctcttggaaatgggcggcgaacggcggcattgcaggcatgggattcgtgttcggagcggcgttcggcgtgctgctcggcggtacgccgcctgactgcttatcggggatactcatgagattgcgatgcgttatggatggggcgactagttcttcggttctcgaatcatgtatccgataccgcgcttggtttcgatcagcggagtcaccttgcgcttgccgccttcgccgtcgtcgacctcgatgccgtcgactttcttgcgcaggtaggagatgtacgattcgacgatggctgcgtcgccgccccagtcgtattgccagacatggtcgagaatctgtgccttggacagtactcggccctcattgtccatcaggtagcgaagcagcttgtattcggtggggctcaggtcaaccggctgccctgcacgggtcacatcgtgggagtcctcgttgatttccaagtcggcgacgcgaataatcgggtcgtcttccacctgttcgcgggtacggcgcagaatggcgcggatgcgagccacgacttcctcgaggctgaacggcttggtgacgtaatcgtcaccgccgacggtcaggcccatgatcttgtcttgggtgtcgtcacgagcggtgaggaacagcacaggggcgttaatgccttcctggcggatgcggcgggtgacggtaaatccatcgatgtcaggcagcatgacgtccaacacgatgagatcaggctgcactttttcgataacctcaatggcttcggaaccggaagcggcggtgtttacctcgaatccggcgaagtgtagggaagcgaccagcagttctcggatggacggctcgtcgtcgacaacaacaatcgatgcttcaataggcttactcatgcttcctagagtgtcgcgctcttctgggcgtttcctgaatgtcatcttggagttcggccttggaatccttcttgatctccttgcgccgacgaatcaccaccatgaccacgatgatgatgaccagcgccaccaacaccacacccatgatgattatgcctacggtcaccgtggatgatgaggtggaggcttttttggatttcacgatttgatccatcattgccgttgccgcgccagaccagctcggcgggttttccagtaacggctgctgtgcggcttcggatagcttatcgacggttttgttatcgagaagccacttatcggagttcttggacacgacgaccaccaggttgccgtcattcgaggccacggcaagcatcactgtgttcggcttgggattcatggactccatcacggttgccgcccagtcttccggtttctgttgactattgaaactggaaagatacagcagatgcacgtgtacaccggtttccttctcggttttggcgatggcatccgcgacttcggccgcatgggagcccaggagattttccgtatccgtgatgttctcggtgatggtcacgccgctgtcggtgctgctgctggagctgtcagagctgtcgcccgagttatccccataggcatttgcggttatccacattgcgttcatcgctactgcagcaagggcgcaaatggcacaaacaagccattttcggaccatattcccgaaggccgaacaggacggctccgaagataggaccacaatagttgtttttccgtcttcccgattcgttgttgacatatcctccaccttagcggccggtattggcaagcggccgccatacataccattaaccctctagaaaaggagcaacgatgccccaatatcaggtagattccgagcgaatccaatcatcctcggccgcagtggccacttcgatctcgcagatcaggcaggccgtgggcggcatgtacaccaatctcaatgccttgcaggacgcatggcgaggttcggcggccacccagttcaccgcggtagccgaacagtggcgtgcggcccaacagcagatggaggcctcactcgagtccatccaacgctcgctgacgcaagcctccaccgtgtacgctgacgccgaaatccaagcttcgcgcctgtttgccagctagtttcttggctctcctccctgaggggagctcgatcgcgaagcgaaactgagggagtatccctacaccgcagctccccttagtctcactgcgttcgacagctcccctcaaagaggggagccagaatacaaaaaaggggactcccgaaggagtcccctttcagctcaatcagctagcgatcgcttgcggatcagtagcccatgtcggcaccggcggccggggcagcaggcttcggctccggcttgttggcaacgacggcctcggtggtcaggaacagaccagcgatggaggcggcgttctgcagagcggagcgggtcaccttgaccgggtcggtcacaccggcggccagcaggtcttcgtaggtgtcggtggctgcgttgaagccttcgccatcaggcagggaacggacggtgttgatgaccacgtcaccggacacgccggcgttctcggcgatctgcttgatcggggcctcgatggcgcggaacacgatggcggcaccggtagcctcttcgccggtcagggaggcgacggcctcggccttctcggccttggcagcagcctgaacgagggccacgccaccgccgggcagcaggccttcctcgatggcggccttggcgttacgcacggcatcttcgatgcggtgcttgcgctccttggcctcaacctcggtggcagcgccgaccttgatgacagccacgccgccggccagcttggccagacgctcctgcagcttctcacggtcgtaatcggagtcggtgttctcgatctcagcgcggatctgggccacgcgagcgtcgatgtcttccttggagccagcgccctgaacgatggtggtctcgtccttggagacgatgaccttcttggcgtggccgagcacggaggtgtcgacggactcgagcttcaggcccagttcgtcggagacaacctgagcaccggtcaggatggccatatcctgcagcatggccttgcgacggtcgccaaagcccggggccttgacggcgcaggacttgaaggtgccacggatgttgttcaggatcagggtcggcagtgcttcgccgtcgacgtcctcagcgatgatcagcagcggcttgccggtcttcatgaccagctcggccacgtgcacgatgtcctgctgggaggagaccttgccggaggtcagcagaatgtacggatcttcgagcactgcggtctggtcgtcagcgttggtgacgaagtacggggcgatgtagcccttgtcgaaacgcatgccctcggtgaagtcgaggtccaggccgaagcggttgttgtcttcaacggtcacaacgccgtcctggccgaccttgtccagagcctcagcgatcttctcgccgacctcagggtcggcggcggagatggtggcggtagcagcgatctggtccttggtctcgacgtccttggcggcggcgacgagttccttgacgatgacctcggtggccttctcgatgccgcgacgcagggcgatcgggttggagccggcgaccacgttcttcagaccctcgtgaaccagggactgagcaagcacggtcgcagtggtggtgccgtcaccggcgacgtcgtcggtcttcttggcgacttccttgaccagctcggcgccgatgcgctcgtacgggtcttcaaggtcgatttccttggcgatggacacaccatcgttggtgatggtcggagcgccgtaggtcttgtcgagcacgacgttgcggcccttcgggcccaaggtgaccttgacggtgttggcgagcttgtcaaggccctccagcatgccctgacgggcttcctcatcataagagatgatctttgccatggttgcgtattcctccaaatggctaggtataccggttatcactcgcaagcgtcgagtcgtgacgaccagccgtcagctgccgattatcactctcgacctccgagtgctaacccagacattagcactcgcgaccgccgagtgccaacatcatcggcggcgattgcgctttgggcatgaaaaggccccaaccgtcgaaacggtcagggccttcaatgcacatccttgcgtgcgtgttgctcactcggagcgggcttcacccgaagacagcttgacaacatcctttgcctgcgtgcctttgccggacgaagcgggcgtatactccacgcgatcgccctcgtacagcatcttgaacttattggtgctgccgtcgtccttgatttccgcgtagtgcacgaaaacgtcctcgctgccgtcgtccggctggatgaacccgaaccccttcttggcaaggaagaacttcacggtaccttgtgccatatctgatctttcctttgttcccttaggcgtcgcgacacaaaacctatagggaacgtagaaagaaccgcatcgcgctcccctacctcgcgactagatgacaattgtacagtgacgagggaacaatcccaaccgcagtggcacattttcggtacgaattatttcatagacgtgagaacgctcacagttttcgatgtattccacgccgatatcaggggcgcatcaacaacgctagttgagcagcaccaccgtaatgggaacggcgagtccttgcacctgctccacagccgaaatgccaagcgtggtcgccacatcttcggcggtggctttatcggcttcattctgataccataccacggaagaagccggcaatgtgccgcgcggattggtcgcctcgacgctggtgtaaccggcggtctgcagcacatcggcctgctgacctgcatatccttggattcctgtggcgttgaccacacgcacctgcgtggccttattcacagtcgcggtggctccggactgctgagactgctgatcggagtcttgattctcattcgaggatgtcgtatcactgttggtatcggattttgccgaatccgaagtcgagtccttggacggatcggtcgaagtggacgaggaatcatccttggtgctgtttttggtcccagccttgctggacgaatcggacttggaagcagtcccggacgtggtcgcagtctgggacgatcctcctattgcattcctgtattccccggaaatccatgcccagaccccgacaccgcacagtgcggccaccagaataacgacgatgaacgggcagaggcgggccactgccgaacgagcgccacggtgaactcccaccggtcccttcggaggattgtcgaaggaatccggttcataggattcgtaggtcatcatgtcgcgtgccataatcgccctttcttcctgtcaaaactacccatgagtgtaatcggcaaacaactcatcagtccaccacaccacgcctcgtgcaccggatatgcacgtttgactacagtggtgagtcatgatcaaaccattgagcgaactggtagagccggggtgggcccatgccttggccgacgtggagcccgccatccaccatatgggcgattttcttcgtgcggaaaacgccgccgggcgcccgtggctgccggcaagccacaatattctgcgcgcgttcaccatcccgttcgattccatcaaggtgctgattgtcggccaggacccctacccgaccccgggtcacccggtgggtttgagcttctgcgtggcgccgaatgttcacccgctgccgaaaagcctggtcaatatttataaggaattggttgacgaccttggggtgcccatgcccaccaacggcgatctgacaccgtggacggaacgtgaggtgatgttgctcaacagatgtctgaccgtcggcgtcgggcgaccgaattcgcatcagggcaaaggctgggaggaagtcaccgaggccgcgattcgtgcgttgaacgcgcgcacggacgccgacggcaagcccaagccgctggtggcgattctctgggggcgtaatgcgcaaagcctcgagccattgctgaccaatgccttcattatcaaatcgcctcatccgagtccgctgtccgcttcccgcggattcttcggctccaaaccattctccagagccaatcaagccctagtcaccatgggtgccgacccggtggattggactctttagacagaccaacagtcattgtgagtagttacagtgagggcatgactttgttccccacgcaaccgaacataccttcgccgaccaccgccgcacgaccggtcaccgttcccgcgcccggcgtgtcggctccgctgggtgccgatgacgccaaacgcgcacgtatcctggccgacgccattcgggcgaggttcgcccagacactggtgggtcaggataatctacgcgaatcgcttatcgtgaccttggtggccggcgggcatattcttatcgaatccgtgccgggcttggccaagaccacggccgcccagacgctcgccacctgcgtatccggctcgttcaaacgcgtgcagtgcactcctgatctcatgccatccgatctggtgggcacgcaggtcttcgattttgcgtcacagaagttcaccacgcagatcggcccgattcacgccaatttcgtactgctggacgagatcaaccgttcgaatgccaaaacccagtccgccatgcttgaggccatggccgagggtgccacgaccatcggcgggcagcgtatcgccttgcccaagccgttcatggtgatcgccaccgagaatccgattgaggaggagggcacgttcaacctgcccgaagcccagatggatcgtttcatgatgaaggccgtcatgacctatccttcgcccgacgaagaggctcgcatgctggccatgctcacccaccgtggctccgatatgatcggtcccgacaccatcaccggcgaacgcatttccgtgtctgacgttgattttctgcgcaaggcggcacgccgcgtgcatgtttccgacgcgatcatgcgttatgcggtcgatatcaccgccacgtcacgaggtgccggctcccgccccatcaagggactgtcgtccttggtgcgtttgggtgcctcgccgcgcgccaccatcgccttgacccgtatcggccaggcgaaggcgttgctgtccgggcgcgactatgtggtgcccgaggacctcaaggcgttcgctcatgaggtgctgcgccaccgtattatgctgacgttcgaggcactggccgatggcgtggtcagcgatcagatcgtcgacaagatcgtcgaaacggttcctgttccgtgagttccgattccgttcgcaagaaaatcgaggcccttggcactcagctgagcctgcctaccgtaaggaaggctttgggcgtgctggagggcgaacacgcatccgggcgtcgtggcggcagcggcgatgcgatggatgtgcatgcctatgagccaggcgacgaatcccgtcttatcgattggaagaccagcgcccgccaaggccgccccatggtggtcgagcgcgagcgcctgtcgacgtcacgggtctggttgctgatggacgttggcctggagatgactggcgtatgcccttccggagaacgcgcatggcaggttgccgccaatgcgctgcgtatgttcgccgcactgtcgttgcgccggtcggacgatatttcgctggtgttcggcgatgagtccagcatcacccgcgtaccgttcaacggtgggttcgcgcagttcgaacgcacgctggacaaggcgcttgaccgtgattgggatcatcaccgtaatatcgacgcgctgctggaatatgcgcgccgtatcaaggatcgcgaggcattgatcgtattggccaccgatgagcatgcgatggaggagcggcatatcaccacgatccgtcgtattacccgcacccatccgatggtgctgatcgatgtggcgacgatgaatccgttcaaggccgtctcatcccgccacgctcccaccgacggcttgagtgcacggcgtgtgccggcattcctgcgcaacgccaaggcagcggccgaggtcgatactcatcgcgcgtatatggccgcggctttggaacaggagctcacccgtgccggttcccatatcattcgatccgcatccagcgaatccatgttcgatcgtttcgtcgccctggtgtcccgggcattggcccgcaccacacgcaatagactgggtactgcacccgaactggtcggactgactttggctggtgatctatgatgcacagcatgttccccatcatcccgctcgccactgatcccggcgatctcaggcccgtggagtcgttggccttgaccactcccctggtggtggccatcgtcgcatgcctgttgctggcggtaggtctgatcgcgttgatcatcatgctgtctcgccccgcacgcaaacctcggaacagcgaccgcgcgcgtggcgctcatagcaatgccagctccaaggccgagtggcgtgcccgcatcgacgatgtggtggcccgtcatgaatccggagcactgccccggcatgaggctttcgtcgaattgtccgtcatcgcccgtgatttcgccggtgccgcatcaggcaaggagcttagttccagtacgctgaccgatttggcgtacctgaatcgcacgcccgcgaatcgccaaggattggacgcattgaagcagaccattagcgcgttgtatccaccggaatttgccgatgatgcccgcaaccgaatcgcccagacgaccagcgtgcagcaggccgccgagtgggtggcgaatctggtggaaaggtggcgttcatgatgctggcatggcattggccttgggccgctctggccggcgtcttggcgacgctggcgattatcgtgctgattgtcgtgttcgcccgccgtaacgccgccgacgacacccctgtattctcgatggacgacgatctcaataccgagcacgcttcccgcctgttccgtcaatggcgcgctttgggccgtctcgccatcagcgtgctggtgcttgcgctggcgctggccattgtgctggtggctcgccccagccaagtggatgccggtgacgaacgcgcttccagccgagatatcgtcctgtgtctggatgtgtcggggtccacgctcccctatgatcgcgaggtcatcgatacctatttggaactggtcaagcatttcgagggggaacgtatcggtttgagtatcttcaactcgacctcacgcacggtgttcccgctgaccgacgactacgaactggtcaccaaacagttgacctccgccagcaaggcgctgaaaggcgtcgagtcgcaggatgacatcgataagatgtccgatgccgaatatcaggacatcgccaattggctcgaaggcacgcagaaccgcaaggacgccacctccttgattggcgacggcgtggtgtcttgcgcggcgatgctccccggtttcgcttatggcgaagccaatcatgcggatgccgaccgtcagcgtgcggcatccatcgtgctggccaccgacaacgtcgtgtcaggcaaacccacctattcgctgaccgaagcgttggacttgacccagcagaccaaaatcaccgtggacggcctgtattccgggccgaaagccagtgaatcggaccaaaccacaacggatatgaagtccgcgatcgagtcgcatggaggcatcttcctcacccaatcgaatggcacgtcgatagatgagctggtacgggatattcagtcacgtagagatacggatgtggagaacaaggcgaaatcctcaatggtggacgctcccggtctgtggacgcttgctctggccgtgatactcattatctggatcgtatgtgcatggaggttgaggcgatgaacggattcaccttctcccccgccttgggctgggtcgccggcggactgctggcggccgggctcgccgtactggccattctcgaaatcgtattgtttgttcgtcgccgtgcttccagtgacgagaccgcgtgggcttgcatacgacgtacgctaatgctgctcatcgtcgcggtgatggtactgactcccagcgtggtatcgtctaccacctcacaggccatcaatgccaccgacgtcatcgtggcggtggataccaccgggtcgatggcggtggccgatgccacatacgggtccgagaagaccattacccgcatcgatgccgcacgtcaggccgtgcatgatgtgaccgccgcttatccggacgccagtttcgcggcgttacggttcggtgcttcgggaacgcttgatgtgccgctgaccccggatgcgccggccatcgataattgggccaacacgttggcggtggaagccacatccgtgtcggcgggctccagtctggatgctccgatcgatcaattgctgctgaccgcgaagtcgattcgtgaagcgcacccggatgatgcgattgtgctgtacctcatcactgacggcgaacagacctcgaatgtgacgcgtcgtacgttctcgtcactgcgacagtatctcaatgatgggtttaccgtgggcgtcggctcgaccgagggcggcaagattcccgtcatcgccgatggcgtcagtgccggcgattccaacaccacggaccactgggtggtcgacccggataccggcgaacccggcatctccaagatggatgagaagaaccttaaagacattgccgacgagatcagtggcacgtatgtggccgtgaacgcttcacagactttggcggattcggtttcggccaagtcatcgaagcagtggcgcatgaccaccacggtcaaggagcgcacacgcaccacgccggtggtatggccgctggccattgcgttggcgatattgcttgccatggaagtcggtgcatggatcgcaacctcaaggagactgctgtgagaaacagtaacgaaatccacgagaacgatgactcggcgaatactcggatgcgggcgaagtgcccgctttgggcacgtatcgtcctggcttgtggcgccgtattgctgttgctggttgccggcgtggcggcagtaaacctgtccgcttcgattacgttcaatcaggccaccgcatcattgaatgccaatatcaaagcggctcaggatgagtcgactgatatcaccacgctcaaggcgcaacagcagcagaccgatgcgcaattcgccgaggccgggcgaatgcgcacgcttctgttgccgcaagtcaaggacgccatcgacaccaatgcttcgatttcttccgagctgacaaagatcaccttgaaacaggccgaggcgcagaacagaggttccgattccgggcaagcccagtcggcacagcaatccgagagtacctcatccaatgccaaaaagggcggcgcgttgaccgacgaacagaagaagcaggtcgaggagctgatgaaggccaatcagcaatccaccgatacccagtcgaacaccacccaatccgagcagaaagcgacgcagaacaagggtaccggggctaccaagccgtggtaagcagtcgttcacagttgttcttttttctcacaccctcacgggtcatggctttatcgcggctgtttcccggtttcggctgtcggctttggcatttatccaattttcgataggccatggctgatccaaggtatgtccaaacaggctatttgtggataatcgttacgactatgcacaacacttggggataacttcacccaaaatcggcaagctagaaccacattggtcgttccggctggacaagcatgagtcttgtccttttagctggatatatgaatacctacaccagcaacccagcacccatcgatcccaccggcggctttgccggcaatacggtgacgccgttcgattacggcacttgcccttgccatgcggcggtacagcgtagtcgcgacctcgtgtccgtccagcgtgcggccacactggcgcaatcggaccagacggcggtggccgtgaaccgctccagcaacatcgtgtggaccggtaaagccgccgatctattccgatcgcggctcagtcgcaccgcacagtattcggccagtctcgcgcaagacatggagaccacccaccgattggcttgggggtcgtcatgagcgagcacgattactggcaagtggaatcgtccgtttacggcggagtgggatatgcgccagccactcttgaagaatatgccgccatagccaaggctctcgatgacgaggcggcaggatttgcggccatagccacggcttgggaatcggccgcattacagttgcagtcacatcggcatagtgcgccgatgtgcgtcaccttgcagtcgggcgatccgagcgccgttgttcccggccatgtcactgcaccatatgccgcgctgggcaatcggtgttatgaccatgcaacggcatgtcagcggttgagcgatgatctgcgtggcgcggccgatctgctgattcgcgcacactctctgtattctcaggcggagatgacggctcggcgcatgtttaccgaattattgcaggccggtacacaggccaaaccgggatatgccgcggtgggtgttgccgctgtggcggcgggcggctttctggccggctgggctattgacggcaaaccgaacccagcatggatgtccacgttcacctatccgttccaggaaggagtgctcagcggcgcgggcggaatcattggcggcgtacctattggcaagagcattgcgcacaccgatgaggtcaacaaggctgcggggaaaatcgccaatttctccggcccggcgaaagacgtcgtccaaggcaatcatctgaacgtgcgcgaggtgcaggcgaatgccgacgtcgtccgtgcaagcggatcggtggccgagtcaatggagaatctgcgcaggctcgccgaagaacggctcggcaaaatcgagctgaacagcggactcgaatatgggaccatcgccattcaacgctatgaacgggctgatggaaccaactcctggctggtcaccatcccgggtaccgatggacaacctgactcaccattcggctgggcgcagaacgtggaactgatgagcgccgatcaggagcgccgcaggaaagcggacagcgctcgcacggttgccgaggcgatgcgtcaggctggtatcggcaaggacgagcccgtggcactgatcggccactcccaaggtggcatcgttgccgccacgcttgcctcggattgggcagaggaatataccatcgagcatgtggtgacagccggatcgccggtggccaatcatccgattccgcaacgcacgtgggtcaccagcgtggaaatcgatgatgaactggtcgccgcgctggatggtgccgccaacccggtcaccgataattggctcaccgtgcaagggcatgtatcgcccgcgcccgcggcaacaccatccacagtgcattcggacgtctcatgcactcccggcgcaacgcccatcaacggtctgaccccatatgacgccgcatccgtggctggttcgaccaacggcagggagttgtcgcattggctcaaataccatcaggccgcttatcagaacgccaccgacctcggctcccccgccgtgcagcgccacgaagcgcattttcaggaagtcatcaacggagaactcaaggaaacccgctattaccaaggccgcatgacccagtccacaaccattgctcccggcgagcgcaccaccgagttcagcacgttcggcggttaaaagtaaataccacacttgacagagttgtcaagaaaggagttaacaatataatgacgagtaggagatggctcatcaaactgatgaagcaagcggcgaaacgcaagaatattacgtttgagagtatcaggcaaagagggagtcatgagatattccaactcgatggactcatgattcccatcccacgccataacgaaatcgacaacgacctcgcgaacatcatttgtaaggaagcagaagccaaactcgggaaaggctggtatcagcagtgaaaacatatcaggtcatcgttcgtcctggcgaaaaatactggattctcgagattcccggtatcggtttcacgcaggcaagaacaacagcagagattgaaagtatggcacgcgaccttatcaccgtcatgacgcaagatgctgatttcgcactcaccatagagacaaaactgccgcaatccgtacaagagcaccttgatgaagctcggcgactgcgcaaggaagaagcggaatgcagatcgaacgcagcgcgggaaactcgcgccgcggcacaagaactacatggcatgggtctcgccctacagcaaataggcgatatactcggggtctcacggcaacgggcacatcaacttgtcaatgctgtcaatgcttagcatcaatcggctaccccccacaatgcaatcaccgcagagacgcggctagcgccactttcccgggattgttgcgctaatgcacccacatggccctctattggcgttactttccaaggaatgttgcgctagcatgcccgtattcccctctattagcgctactttcccgggaatgttgcgccgctttttttatcaagagacgggtattggcgcatcggctacggactctctagcgatatacatggtatcgatatgattaagattatcgtcagaagacccgttttcaatcatctctagaatctttcgcgcgctgttcactcccatttgttctacctgctgagaaatcgaagatatccgaggagtaatcaattcgaatacttccacatcgtcgaatgagacgatggaaatatctataccaacattcagatgcagagtatgcatcgcccccatgcctgctaaggtcaaaggagaattagcgaaaaataacgcactcaccccttgtgaatacaacctactaatttcttcacacaccacatctctcgacccgtatggatcataattggcaaaatataaattgctctctccgaacaatgctgaggcaaaacgtcgaaagacacgctcacgctcaataaataccggggaaatggcagacggtccgctaacaaatccgacttttttatgtccatgatcacgaatatcaattaacgcttccagcaatccttgctccggattcgaagcaatgagaggaaccccctgcactccggccgcaggacgatcaacaaaaatcactggcagcccatgatgtagaagagattccagtgcctcactatcaggaccttgcggcacgataatagctccatcgatatgctcagccaacaatcgacgcagtaacatgtcttgctgttgcaaatcatttgaaaatgatccaattaatgtcgaatatccagatgcaaataatgtgctctgcactgcatgagccaaattcgcaaaaaactcattacgaatatccgaaaccagaaaacctaccgtatacgaacgcgatgaacgcattgtacgggccatcgaactaggaatataatcaagctctttaatggccgcttcaatcttcttccgcgtgggctcagagatacgtcccttaccgttaatcacctgagaaacggtggagacagagactcccgcgcattttgccacgtcgctgattgttatgtaggacctctccatagcacccgactatacgtgaagacaccgattcttgcacattcagtaattggcccttcgctgtttggtgtgggtggggaccggtcaggtggtgacggttcgcaggtcgagtttgccgcaggtcaggtagatcatcgtggagaagtactccatgttgcgggagccccgggcccgggtcttgacgtgctggatgatgctgttgaggccttcggggatcgcgttggtgtgccggtggtcgaagtaggcgagaatgtcgtcccagtggcggtggaactggcgggcgagggttttcatgggttccaggcgtgacctcatcatccatgagcacaggtgtttgagaccgtcctcggcctcgacccggttggcgctggtgtcgtagatgtcctggagggtctcgcgcatccggtaggcgcgcgcggtcttgagccgttgccgttgcaggccgcgcttggtctgaagctggagttcggtcaggttcgcctcgtttttgagccacaggtacttcgtccttttcaacaggccgttctcccggccccggccttcccggccttgtcgacggcctcgttggcgtgctcgatcacatggaacttgtcgatgaccttggcggcgtcgggaagccattggcggatgccctggcgaatcccaggctcatgtcgcacgtcaccgggcgcacgcggttggggtcgccgttgtggtccatgaaatcccttgcgaaccgttcgatggtatgcgcgtccttgtccggcgtcacgttgatcacgttgcgttccaccaaatcggcgaccacggtgatgcagttgtgtccccgtcggctggtctcgtcgatgccgatcgcctccacgcccgcgtggtcctcgtacaggcgcgcctcccgcacgtagtgcgtgatgaaccgccacaggcgggtgtcgtgctcgccgacctgttcggcgacgtccgcgaccggctggcatttcgccagttccacgaccatggcctcgaacaggagcgcggacaccgctgcccggcctcgcccacggcaccggcactgccctgacgccatgcgcggggcacgccacgcgcggcactcccgcgtggatgaacgccttgtactggaagaagttcaggtgacgccacacgcgctcccgcacgtcatgcaccgggcatgcctcctcacggcacccggcctcggggcagtggaagcgcgagccagactcgaagctgatcgcgacatgcagttcgcgtttgccgtcctccccgtcgcggaactccacgcccgacacactccacgggccgggcaactacaaggcggcggtgaacaacgaagtggtatccataccaccaaactagccgaccggtatcaccacacgaccggcctcacccacaccaaacagcgaaagaccatttaatatttagtaatggggtatcgtgactgcaatcatgacacccctggaagaggaagtgaatcccatgagatccccctcatttgatgaccatgtctagccgaaattacaagcagtaggcatgatcacgattgatgcaccacgctcagcctttctttttcttggagagcaggtcgtaggcgacggcggcgatgacgacgaggcccttgatggtcttgacccaggcggcgtccacgcccatgatggacaggccctggttgagcacgcccatgatcagggcgccg

SEQ ID NO: 3010 - DNA, 3269 bp, Unknown
  R19_24m  MAG No. k141_14100
tacctgatcagcaaccagtactacaaccctgcggtcttcaaccagtactccgctgaattcctcgaccgcatctacgagcacgtggaatccgccggctttgagttcggcactttccttggtgcgttcaagttctacacgtcctacgcgctcaagacgttcgatggtcgcctctatcttgaggacttcccgcagcgttgcgccgctgtggccctggagctcgccgccggcaatgagcagcaggccatcgaatacgccgacgaaatgcttgccggccgcttccagcccgccaccccgaccttcctgaacctcggcaaggcccagcgtggcgaaccggtcagctgcttcctggtgcgcatcgaagacaacatggagtcgatttcgcgcggcatcaacgcggccctccagctctccaagcgcggcggtggcgtggccctgctgctgagcaacctgcgcgagctcggcgccccgatcaagcacatcgagaaccagtccagcggcgtgattccggtcatgaagctgctggaggactccttctcctatgccaaccagctcggcgcacgtcagggcgcgggcgcggtgtacctcaacgcccaccaccctgatatcctgcgcttcctggataccaagcgagagaacgcggacgagaagatccgcatcaagtcgctggctcttggcgtggtgattccggacatcacgttcgaactggccaaacagaaggcccagatggccctgttcagcccgtacgacgtggagcgcgtgtacggcaagccgttcgccgacatctccgttaccgagcattatgacgagatggtggccgacgaccgcatcaagaagacctacatcgacgcccgtaagttcttcaccaccatcgccgaactgcagttcgaatccggctacccgtacatcgtgttcgaggacacggtcaaccgcgcgaacccgatcgaaggtcgcgtgaccatgtccaacctgtgctcggaaatcctgcaggttcaggagccgagcgcatacaacgaggacctcacgtatgcgcatgtcggccgcgacatctcctgcaatctgggttcgctcaacatcgccaaggcgatggatggcggcttgggccacacggtggagacggcgatccgcgcactcacctcggtggccgagcacaccagcatcaacgcggtgccttcgattcgccgcgccaatgaggagggccacgccatcggtctcggccagatgaacctgcacggcttcctggcccgcgaaggcatccagtacggttctgaagagggcctcgacttcaccgacatgtacttcatgaccgtggcctaccacgcctaccgtgcctcgcacgcgctcgccgtggagcatggccgcacgttcgccagcttcgctacgagcgactacgccaagccggccggccagggcaactacttcgacaagtacaccgatggtcgtcgttcgctcactccgcgcaccgaacgggtccgtgcgctgttcgaacagtacggcatcgcgatcccgactgctgccgactgggaggccctgcgcgacgcgattctgaaggacggcatctacaaccagaacctgcaggccgtgccgcccaccggctcgatctcgtacatcaaccattccacgagctcgattcacccgatcgcctccaagatcgagattcgcaaggaaggcaagatcgggcgcgtgtactacccggccgcctacatgaccaacgacaacctcgggtactacaaggacgcctacgagatcggctggaaggccatcgtcgacacgtacgccgaggccacccagcacgtggatcagggactgtcgctgacgctgttcttcccggacaccgccaccacccgcgacctcaataaggcccagatctacgcctggcgcaagggcatcaaaaccctctactacatccgcatccgccagcaagccctggaaggcactgaagtccaaggctgcgtctcctgcatgctctgatcgttcgagggagcgtataccgcctttcttcggcactcgacgtaccttcgtgcgccttcggcctcagacggcggtctccgcacgcattgaacaaccagagagccgttgttactcccctcactcggctaacgccgacagctcccctcagagaggggagctggccgcgaagcggactgagggggggctccaccatctaaggaaccaacaatgtcacgaaccatctatagagcactgctccggctgaccgcgccggaggagttcgaaaacaagtccaacgacgataacgacaacgacaacgagtaataaggaacactcatggcaccgatttccattccgcgcaaaccgctgaaactcatcgaccgcgtctccgcaatcaactggaaccgcctcgaagacgagaaagaccttgaggtctgggaccgcttgaccggcaacttctggctgcccgaaaaagtccccgtctccaacgacatccccagctggcagaagatgaccgaggacgagcacacgctcaccatgcgcgtcttcaccggcctgaccctgcttgacaccatccagggcacggtcggcgccgtctccctgattccggacgcgctcaccccgcacgaggaggccgtgtacaccaacatcgccttcatggaatccgtgcacgccaaaagctactcgtccatcttctccaccctgtgctccaccgaacagatcgatgccgcattcgactggagcgagaacaacgagtttctgcagaagaaggcggaaatcgtgctcgactactacgagggcgacaacccgtacaagcgcaaggtggcctccaccctgctcgaatccttcctcttctactccggcttctatctgccgatgtacttctccgcgcacgccaagctgacgaacaccgccgacgtgattcgtctgatcatccgcgatgaggccgtccacggctactacatcggctacaagtaccagaagggcatcgcccagctgagcgatgccgagcgtctggatctgcaggactacacgtacgacctgctcaacgagctgtacgacaacgaagtggagtacacccagtcgctgtacgaccgcgtgggcctgaccgatgacgtcgagaagttcctgcggtacaacggtaacaaggcgctgatgaacctcggctacccggctttgttcccggctgagatttgcgatgtgaaccccgcgatcctggccgccctgagcccgaacgccgacgaaaaccacgacttcttctccggctccggctcctcctacgtgatgggcaaagccgaagaaaccgatgacgacgactggga

SEQ ID NO: 3011 - DNA, 16570 bp, Unknown
  R19_24m  MAG No. k141_14531
cttctcccagcgggaaagcgcctgttgggtgacgaacagctcgtgcgcgaactgcgactgcgtaagacctcgctcctcgcgcacgactttgataacctgaccgatcgacatgactacctcccgacatcggaaaacgattcgcgcgtctcgctgtgcgcttgctgattccagtctaagggcatgtcccgttcgccaagcgcgggtacaacaaaccgttgttcgcgcttgtatcccggaggaagaaacagctcggtcgaacctatttcctctccacccccttcaatgctcccggttcctctgactcctttgcgagcgccgcggatgggatgagcacgcttacgtatggggttgcgccagacaggacgtcgtcgtagaagcgctgtttggcgtcgatgaagtcgatggaatcctggatttccgcgagctgctcgaccagccgcgcccgcttgccggcgagcatctacttgcgttcggggatgctcggctcgtggaggagcgtaaggggcgcgagtaggggttcgcggctttgctgcggtctctccctcacccggctatactgggagctccctcgtcagagggagcttaaattcggtctggttataggcccatgggcttcttgggctttttgtcgctcatgagcatgaggaagctgcgggactgggcggtgatcatgaagcccgcctcatagctcagttccggcccattcgggttgtgcgtatccacgaccagctgccatttgcggccgtatcgctcatccggcagggtgaacataatcggctcgtaatgcgcgttgaagatcaggatgaagtcattgtcgaccatccggttgccgtaccagtctacctccggaatatccgaaccgttcagatagatcatcatggagaacgcatgcgtgttctgccagtcgtccatatccatgatcgaaccggtgtggtcgaaccattcgacctgcggaatcatgttcgaatcgtcgccgggctcacggcctgtgaagaagcgacggcggtgcaacaccggatgatccaaacgcagatgaatgagtttggaaacgaaggcgagcagttccttgcgtcccttgtcaagatgccagttggtccaggagatctcgttgtcctgacagtaggcgttgttgttgccctgctgggtgcgggccacttcgtcgccaccgcaaatcatcgggataccctggctgaacagcaacgtggcgaacatgttgcgcatctgacgctgacgcaagtcgttgacgtccggaatattggtcgggccttcaacgccgcaattccaagagcgattgttgctctcgccgtcgcgattgccctcgccattggcttcgttgtgcttttcgttgtagctgaccaggtcgttcattgtgaaaccgtcatgcgcggtgatgaagttcacggacgccaccggtcgacggccgttgacctgatacagatcggaactgcccatcaggcgcgaggcgaattcgggcagcgtggagggctgcgagcgccagaagtcgcgcacggtgtcgcggtagcggccattccattcggaccagctggacgggaagccgcccacctgatagccgccggagcccagatcccacggttcggcaatcagcttcacgcgcgagatgatcgggtcctgctccacgatgtcgaagaacgcggacagcttgtcgacctcctggaactggcgtgccagcgtggcggccagatcgaagcggaagccgtcgacgtgcatttcggtaacccagtagcgcagcgaatcggtaatcaactgcagcgcgtgcggcgagcgcataagcagcgagttgccggtaccggtggtgtcgaagtagtgctgctggtcgccttccaccagtcggtagtaggaggcgttgtcgatgcccttgaagctcagggtggggcccatatggttgccttcggcggtgtggttgtacaccacgtcgaggatgacctccatgccggcgtgatggtaggccttgaccatggacttgaattcgttgacctgctcgccgcgctctccggaggaggagtaggcgttgtgcggcgcgaagaagccgatggtgttgtagccccagtagttcgacaggcccttctcctgcaggaaggagtcgttgacgaactggtggatcggcatgagttcgatggcggtgacgccgagcttcttcaggtattcgatgacgctcggataggccaggccggcgtaggtgccgcggatgtccggcggcacgtccatgttgaggttggtcatgccgcgcacatgcgcctcgtagatcaccgaatcgtggtacgagatgtaggggtgctggtcgttgccccagtcgaaatacggattgatgacggccgacttcatggtgtgggcggccgagtcaaggtcgttcatcgccgaggtgtcgtccgggcttttgaaccagtaggagaacaggctttcgtcgccgtcgatgttgccttcgatggccttggcatacgggtcgagcagcagtttgttggggttgcatctgaggccgtgcatcgggtcatagggaccgtagacgcggtagccgtagcgttggccgggctggaggccggggatgtagttatgccatacgtatgagttctgttcggtcatttcgatgcgcgtttccgcatcgtgctcgtcgaacaggcatagctcgactttctgcgcaacctgtgagtacagcgcgaagttcacaccggcgccgtcatagctggcgcccagcggatacattgatccaggtctgatctgcatagttttcagtatcccactttcttgtgtcactgatgtgccggggagttgaacgtcaggagaacagcgacggcttgtctttgtcggagttcctggcgatgagtctgcgtaacgcctcatgctggatggcgatcatcgaattggatgaggtgatgcgcgtggcggcaaggtcgctccacggaatccacgcggattccacgtgctcgtccgcgtcgaaatggcgctgctcccgtctgaacgggcccaaatgcaacaccatgatgtgggccagttcgtcggtcatgccttcggacgagtagaaatcgcccacgaagtcaacacccatggtgtcacggtccggcaccacgccggtttcctcggccagttccctcagggccgcgtccatgatgtcctcgccctcgtccatgagaccggcgggaagcccgtaggcgaacatgtccgatccggcacggtattcgcgttcgatgaggtaacggtcggtggacatgtcgtgcacgagcatgaccacacagggggcgtgacgcagcacctggcggccgatctcgtgttccttgccctgcttgtcggtcagagcgatgcgcatgtcgtccacgtggaagatgcgcccggtataaacggtttcgctactgatcactttggcgggcacgtccatgtcgatgccgtccgaggaggcgttcagcttatggtcgagccgatgctccagttgttcctgcttgcttcccccaaacatgtcatctcctcggaaaaaacgttttcgccacgtcactatagcgccttaatcccgatgcgcggtaatggacagcgtccatggatcggtcgtgtcgtggaaccactcgacttcaggccttgctccggtcgcttgttcgatggcggccggcacgtcatcgatcgcgtagttgaaccacatggattcgatggcggcatgaggggtgttgatgaagcagggacgcacatggctctcccccgccattccatggccgagcatgatgccttgggtcctcatacgggcttcataccgggcttgttcgatggcgtcggtcaccgggtggtgacgcaaatcgctggttacgtacacgtccgcaccggtggcacgcacctcgttgaacagggagtcaccggagccaggcagaatggccacatactgaacaaaagtgtccgaatcgccgcatacctggatgccgagcgcggtggtcatgccatgatcggacacttcgtcgaatacacactgagcgaaatccttcagggcaacaggcttcggcaaacgacccacacgccccaagccgaccggatgagaggcgttggcatcgtcaatcggcacgagtggtttctggtcgatgagtccgaagtagtcggccgccgcctgccccacgccgcgatacgcagcgtcagcattggtgtgccctacccacagcccgcagccgtgctggtagagcctgcggacgatgtcgccccggaaaccgagtccgctcgtctcgtgtacggaacggaagaacaacgggtgatgggtgatgagcaggtccgcgccagtagcgatggccttgtcgatgatggcggaggtcgggtcggcggcgaacacgatgcggtgcacgtcgtggctcagatcgccgacgatgagacccggctcatcccattcctcggcgtagcgcaatgggtacagggtctcgagaacgtcgatgacttgcttgagattcggcatatgtcccattgtagtgggctattgcggcaagggactcattctgcaattgcggacaagccatgctcgtgctcttcattgctcgactatcggctcgccttcgcctacacacaatccactggactgtttgctcaacggctcagcacccctcacccgaggggagctagaaattgtcagtgtgcagcgagctgccagtcggaaccgatgccgcacgatacgtccagcggcacggcaaggtcgacggcgtgttccatggcgttgcgtaccagttcggtgacctggtcgccttctcccggcgcgatttccactaccagttcatcgtgaatctgcagaatgatacggctcttgacgtgggcctctgccaaggtctgcgcggcgcgaatcatcgcgatcttcatgatgtcggcggcagatccctgaatcggtgcgttgagtgccgcacgttcggcggcctcacgcgcaacacgattggtcgaatgcagggccgggaagtagcgacgccgtccgaaaatggtttccgtataccccttctctcgggcattggccaccagcgattcaaggtaatcgtgcaccttgccgaaggtatcgaaataccggtttttcaacgcttccgcttcacgtggcgcgatcttgagctgctgggcgagaccatacgtgctcagaccataggccaatccgtagctcatggcttttacgtggctgcgctggtcgccggtgatctggtcgaccggcagcttgtagaccatcgaggccacgtatttgtggaagtcggctccggagcggaacgcttcgatcagcgcctcatcaccggacagatcggccatgatgcgcagctcgacctgtgagtaatcgcaactcatcagggcctcgtacccctcccccggcacgaacacgccgcgaatctcacgaccggcggcgttccggttgggaatattctgcaggttcgggtccacggagctcaatcgaccggtggcggcaacggtttgctcgaaagtggtgtggatgcgctcatctgatgtgttggtggcatcgatcagcgtttggacgatctgcttgagcttgttaatctctcggtggcgcagcaacgccccgaggaaaccgttggcccgctcattgtccactgatttgacatacagatcctgcaatgcggccgcattcgtggtgtatgagccggacttggtgcgtttggtgggcttcaaacccatatcttcgaacagcaccttctgcagctgcttggggctttgcaggttgatttcggtgccggcatactcccaagccatttcctgtgcctggcgagcctcggcggcaaactggtcacgcatggaaacgagtcgaacgctatcgactttggctcctgtgtgctccatgccgtgcagcacgcgggaaacaggaagttcaatcgcgcgcatcagccagcattgttcacgctcgtcgataatcggcccaagcgtgacggcgaggctgcggataatggccaaatcgcgcagacgatgttcgttcggatcttcttcgacctgatcgtcgtcgaagtccaatgtgccttgcgaaggctgttcggtttcggtgaagtggatgtcgaggaagtgctcggccgcctgcttgaggctatcggcgtggaaatccggttgggccagatacccggcaagcttggtgtcgaacatcggcaggtccatgtcaagatctaccgcgcccagaagatgcagcaactctttatacccatgcacgatggtgcgggagtgctcgctttccaggaaccgcgcaagctgtgctcgcagggtatcggtgattggaaggggcactatggccgctgatgttgccgtggccacggcaatggtttgtgccgtggcacgccccggcctttcgtcgccccacgcggccacggtccaagcgcggccgaccgcgtcgccgcagacggcatgccgctgcgatccatcgccatagtcggaaaccgtgaaatcggcgatttcaccgggaactttgacctcggcgcgatgggccttgacccattcgtcgaactgctccgaagaggtgatgctcgtgggttccggcaggttcagatcgagactgttatcctgctcgtcctgttcattattcgtagactcgccggctccgtatgtgttggaaaccttggcaccggtattgaaggttttcagtacacgactcctggtacgcggtccgaattcaagctccttgaacagggcgtcgatttgtgccacgtccacggtgccgaatgtcagatcctcaatatcgacgccaagatcgacatctcgtaccagtgcgttgactttgcgattgagcttgacctggtcgatattggcccgcagcgattcgccttttttgccgccgatttcatcggcgtgctcgcaaatgccgtcgagggaaccgaattggttgatccacttggccgcaaagccatcgcctacaccgggcacaccgggaatattgtcggcggtttcgccgcggagcgccgccagatccggatattgtgcgggagtgactttgtatttgtcgatgatggactgcggcgtcatatgcttcaggtctttgaagtgatggcccgggtacaacacggtgacgttgtcatccaccagctggaaggcgtctcggtctccggacaataccagtgtgtggtagccggccttgtctcccatggtggcgagggtggcgatcacgtcgtcgccttcgaatcccggcttctcgatgtaggtgacgccgagggccgtgagcatgcgttgaatcaatggcagctgggtgagcagctcttcgggagccgcctcacgggtgcctttgtattgcggaagcatctcattgcggaatgtgccgcccttcacatcgaaggcgacgcccagatggtcggggttctccgcatcgatcacctgcgcgagcatggtggcaaaaccccagacggcgttggtggcctggccgctggaagtactgaagttgtcgaccggcagggcgaaaaatgcacggaaggccagcgagtggccgtccaccaccagcaatgtttcattggtgggtacggtcacgctggcctctcccatagtgtgtttgtgttgctttacgactcagcacggtgatgccgataatcagcgttcgcccgaatcagaaggcttcggatcgccgtacttggcgatgatggcctgagccaggcgcttcttggggatgcgctggtccatggaggtcttctgaatccaacggaaggcaccctgctcggagaagtcagccttgtccatcagcagacccttggcgcggtcgacgagcttgcgctcctcaagcgtgtcttcggccttcttgagcttctcttcggtttccttgagctggtcggtggtttccttgagcttgcgttcgctgcgctccacgttgtccagcagatcgttgatctcggcgaaacggcccatggccacctcgagggtcggcagcaacttggattcctcgtacggcttggtgacgtatgccatggcgccggcaccggtggccttcttcaccagatcggtctgggagaatgcggtgagcatgacgacaggggcgatgttctcatcgcagataatgccggcagcggcgatgccgtccatacgcggcatcttgacatccatgcacaccacatcagggcgatacttgcgggtcagttccacggcttcctcgccgttggcggcctgaccaacgacctcataaccgttgtcttccagcatggcgaccagatccatgcggttcacggcttcatcctcggccacgacgacggtacgcggaccatcctcggccacggccttgcgctcagcaggttcgctttcatcggccacggccttgagttcttcgtcggtcagcacctcatcgacgttgatactcggttcttcggacttcttccttgcagccatgccaacctctttcttgaattacccaacaatggggttcgtaataatttcagcgaactcctagctaaagtgccctcggtgggactcgaacccacactgcgcagattttgaggctgcttcctctaccaattgggatacgagggcgtgcctaagcactctgaagagagtagcataccgattcgactcctgcgacacaagacacgcgccagtcctccattttcccccggtaaaacaggcgaaacacgtcgatatcgtggacggcgtacccgtgtgttgcccgttcttctgcgtggtttcaccgcttacaatgggctgtagtttcgatgtatcgcttttgttaggagggcttatgagcaacgaaacttaccgtcagttcgatccctggcgcccctctccggtcaaggagatttcccgtagacagattgtggagacgcattatttcaatgtcgatcacgtctcctatgagtcgaatcagatcggttcgtttgaacgctactttgttcaggagaacaatggcgacactgtggctgtgctggccgtcaccgatgacggcatgattccgctggtcgagcagtatcgcatcgccaaccatcgttggacgttggagattccggcaggccacgccaacaacccgtccgaacgcccgaccgatgtggctaagcgcaagctggccgaagaggctggtttcgatgcctccaagcttacgcagttcacccgttttatgaacacgccgagctattccacccagcacaccgcaatcttcttcgccaccggacttaccccggcttcccgtcaggaaatcggcccggagactccgcgttccgacgtgcgtatggtgtcggtggacgatgcctatgagatggtggtcaatggcacgattgtggatgccaagaccatggtcgccattctgcgtctgaagagcggcacgctcgatcatctcaacgactagtcaccacgctcgatcatcgcggtgactacgtgccattgcaatcaccgcacaatcgcaacataacggataacgaaagccccccatccactttctggatggggggctttcgcgtgctatgtgctagctgtcagcagctaccagcggcctgaaatcagtcgcaagcgccaacggtgtgcacgtagatggagtcggtgcggcccggctggtgatcgccctgagcagagctcaggatgacgatcttgtcgccgtcagcaaccttgccggcatccttgaggaccttgtccgtgtagatcatcagatccttgcgggacttgtcgtggtagtcctccttgagcaggaaggcttcggtgccccaggacagagccagccagtggtaggtgtgctcgttgctggtcaggccgtagatcggggcggccggacgctcacgggagacgcggtgcacggtggcgccggtctgggtgtaagcaacgatggccttggcgttgagcttgtcggccaggtccacggcggcggaggagacggcgccggtggaggacatgtcgaggttcttgagctccgggatgcggtcgaagccgtggtcggtggcgtagccggagatgcgcgacatggtggccacggtcacatccgggtacttgccgacggcggtctcgttggaggtcatggtggcgtcggagccgtcgaggacggcgttggcgcagtcggaggcctctgcacgggtcgggaccggggagttcaccatggagccgaggacttcggtggccacgatgaccggcttggcatactggcgggccagctcgatgatgcgcttggtggccagcgggacctcttccagcgggcactcaacggccatgtcgccacgggcggccatgacaccgtcgaaggtcttgacgatctcttcgaggttctccagagcctgcggcttctcgatcttggcaacgatcgggatgcgacggccttcctcgtccatgatctcgtgggcgcggtcgatgtcggtggcgaaacgcacgaaggacatggcgatgatgtcggcaccggtgcggatggcccaacgcaggtcagcctcatccttctcggtcagggccggcagggagacggcgacgcccggcaggttgatgcccttgtgggaggacacaggaccggccacgacgaccttggtgtacacgttgttgccctcgaccttggtgacctcaagacggaccttgccgtcatcgatcaggatcgggtcgcccgggtggcaatcgcccggcaggcccttgaaggtggtggaggtgatgtgctcgtcgccctcgacgtcatcagtggtgatgacgaattcctggccgagctgcagctgaaccttgtcttcgccatcggcgttcttcttgaaccaaccgcagcgaatcttcgggccctgcaaatcaacaagcgcggcaacgttgcgaccagtggcttcgctggccttgcgcacgttgttgtagaccttgaggtgatcctcgggggtgccgtgggagcggttcagacgagcaacgtccataccggcttcaacgagcttcaggaggttgtcgtaatcctcggtggaaggaccgatggtgtctacgatcttggctttacgcatgaatgcctgcctattcttgttcaatttggttcgaggcacgattgccccatttgccgaaacccagtctactagcgcgagccgactcatgacaagttttcttcacggtgtgttgtgagcgctcacattgttgtgttgactgggtttaagggttgtattctctaacgatttcaggccttctcggcgctttccatgctcttcatcttgatcacggaagccacggatgcgccgccaattgcgaccacaatcacagccagcgacagccatgtgggcacttccggcacccaatggatgccttcgccgccgttgatgaacggcaaggtattgccgtgcagggcctccatgatgagcttgacgccgatgaagcccagcaccacggacaggccggcaggcaggtagacgagcttgtcgagcagagcacccagcaggaagtacagctgctgcaggccgagcagggcgaacacgttggaggtgaacaccaggaacggatccttggtcaggccgaagatcgcgggaatcgagtcgaaggcaaacatgacgtcggtggtgccgatggtcaggaacacgatgagcatcggggtccagtaacgcacgccgttcttggtggtgcgcagattctcgccgtcatagtcgtcggtgatcttgatgatcttgcgcagattacggatgatgccgttttcgtgatattcctcgtcctcatcgccgccgagcaccagtttgacggcggtgtagatcaggaaggcgccgaacaggaagaacacccatgtgaagcgggtgatcagggccgcgccgatcagaatgaaaatgccacggaagatcaaagcaatggtgatgccgaccgaaagcacatacttctgaatctgcttgggcaccgcgaagttcgacatgataatgacgaacacgaacagattgtcgatggacaacgagtattcggtgagccagccggaatagaactcgatggcgggcctggagccggcgaagaaccagatgcatccgccgaagatcaacgccataaccacgaagaaggcgatatgctgcacgcattccttggtggagggcacatgcggtcggcgcccgatgacgaacaggtcgacgatgaagaacagcgcgagcaccacgaaggtgatgatttcaaatgcgagtggggtttctgccatgattccctacactaacccatgtatgtgacgggtcattgccccgcctcggtcatctgccggagctccttcttgagatcacggatctcgtcgcgcagacgggccgcgagttcgaactggagttgttcggcggcggtgtgcatctgttcgctcagctggcgaatcaggtcggcgaggtcctgcgcgggcaggccggccttcaggatctcctcgtggcgtttgtctgcctcgttgggatcgagtaccggcacgcccaggtgtgtgttgccggccttgcccgcgttgcggtagccgccctcaagcaaggtctgggtgtccacatcctccttggcgagcatgtcgttgacgtcgctgatcttcttgatcaggggcttgggatcgatgccgtgctcctggttgtaggcgatctgcttggcgcggcgtcggtcggtctcgtcgatggcttgccgcatggcttcggtggtttcgtcggcgtacatgatcaccgtgccggacacgtttcgggccgcacggccgatggtctggatgagcgaacgataggagcgcaggaatccttccttgtcggcgtcgaggatcgccaccagcgatacttccggcaaatcgaggccctcacgcagcaggttgatgccgacaatcacatcgatcttgccttcgcgcaacatgcgcagcagttcgacgcggcgcagcgtgtccacgtcggaatgcaggtattcgaccttgatgccgcgttccagcagatagtcggtcaggtcctcggccatcttcttggtcagggtggtgaccagcgcgcgctcgttcttggccacacgggccttgatctcggcgagcagatcgtcgatctgccccttgaccggccgtacgtcgatcttcgggtccagcaggccggtcgggcggatgatctgctcgaccaccccatcggacagtcccatctcatagtcgccgggtgtggcggacaggtacacggtctggccgacgcgctgcaggaattccggccatttgagtggtcgattgtccatcgcggagggcagacggaagccgtgttcgaccaacgtgcgcttgcgggaggcgtctccctcgtacatcgcgccgatctgcggcacggtaacatgcgactcatcgatgaccagcaggaaatcatccggaaagaagtcgagcagcgtatgcggcggcgtgccggccgcgcggccgtcgagatgacgcgaatagttttcgacccccgagcacacgcccacctgggtgagcatttccagatcgtaggtggtgcgcatgttgaggcgctgcgcttccagctccttgccttgcttacgcagttctgccaggcgttcgtcgagttcctcgcgaatggttttgagcgcgcgttccatgcgttcggggccggccacgtaatgggaggccgggaagatgtggatttcgttttcctcgtcgatctcgtcgccggtcagcgggtgcagcgtggagatgcggtcgatctcgtcgccgaagaattcgatgcgcacggccagttcctcgtagacggggatgatttcgaccgtatcgccgcgcacgcggaaggtgccgcgcgtgaaggcgatgtcgttgcgcttgtactgcatggccacgaaccggcgcagcaggtcgtcgcgattgatctgctggccttccttgagaaacagcatacgcccggcgtattcctcaggagtgcccaggccgtagatgcaggagacggtggccacgaccacgcagtcgcgtctggtcagcaggttggccgtggcctgatggcgcaaacgttccacatcgtcgttgatgttggagtctttctcgatataggtgtcggtctgcggtatgtaggcctccggctgatagtagtcgtagtaggaaacgaaatagctcaccgcgttgtcgggcatgagctcgcggaattcggcgcacagctgcgcggcgagcgtcttgttcggctcgatgatgagcgtgggacgttgcagccgttcgatcagccatgcggtggtggcggttttgccggtgccggtggcgcccatgagcaccacgtcgttctcgccgttctcgatgcgcgtggccagttcctcgatggccttcggctggtctccggatggtcggtacggcgatttgaccacaaacggcttgtccacacgttcgatgttgaatcccatgcgctgtttccttccgattcacgctgtatcccgatgatatatcggaatatacgctaggcaactccaatacccgtcttcctcttggacgcgcagccaaccaccgctccgcgtaattgattgacacagatgagacattccaaatcccatgcccaatgttctcggagattccgccaatgctccatccgccatcttggcgggaacgtcagccaccgatacgtacagtccgtcttgccgcacttgtatggcgagcacatacccttgttcgcgatccgcgtgcttggcgatattggcaaacgtctcttccagcaacgaccgcgtcaactggatagtcttctcgtcaaaccgactcaggagatcgaagggatcggacacaaccacctcgcctcggaaaccaagcgctgcgagttcccgccggtgccgttcgatctcggcctcgaagcgacctgcaccgattggaacaatggcttctccggagcgacgcgcatggcatcgcgggattcgcgcagtaccgacattgtgctttgcgagaaccgctatgacatcatgcgtctgatcgagcgcccgttgagccacttcgcgcaacagtggcaagtccatcgactctccttgcgaagggtgttccgacatgatcctgtcgatgctcatgatgagatatgagagatcattggtcgtcgcatcatgcagccttgccgccaaatccaacgattcggccctgccacgcgcttccgactccctctccccctcacgatgatgccaattcagcagcagaccgattccaacgcacgccaacgccggcatgacggtccaaggcacaacggacaccaacgccccggcatcccaacccatcggcaacccatactgccatatcagctgcgccacgcgagatacggtcacagtcaccgccaacaccacgccgcaccatatgcgttgataggagaggacgattaatggctcggctatcaccacgctcaccgacatggacagatccaccggcaaggggaacaccacgcaccatgagatcgccaacgcgatattgccgccgaacgggaatgccacgcagagcaacgacaggatgacgaacaacagacccacccacagggcccacgcatcccaaaccggattgatacacgattcgatgaccgtatcagcggctatgcacaaggcgcaggctagcgccgcgatcttctcgccatgccaagacttcccgaaatcgcggaagcgacgtctaagaaaacggctgccgtcacagaacatggtatcgctcacagtaatcaaggagttcgccgcgcctcgtcaccccgaccttgcgcatggctcgtttcacatagctgtacacagtttcgacaccgattcccaagcggcgcgcaatttcaacggtcggtacatgatgtgcatagagacgcaacaccgccagctctcgatcggagaagagcctggcaccatccgcttccggctgtgcggcatccaccgtatgcaatgtctcttcaaggctatgcaaaccccaaccatgagggtatgttcccccgtcaaacaccgatttgaccgcctcgcgtatggtcgctgcgaaatctcttttcgaaatcaacgcttgggctccgcaacacgcgatatcctcaccataggttgccaggtcatacgaagtgactacgatgacgccaacctgcacgttccgctgtcgaatacgttccgtcagctgcactccgttcagcccgtccatcatgagatcgcaaataaggatgtccggcttccgcggatcgaacagacaacgttccaaggcaagactgggattatccgtaacccatagcatatgcgccccgggaatcgtcctgccaataagcaaagccatcatctccgcagagcaacgatcgttgtccaccaaggcaagccgaatcaggcgcccgttcttcataagtaccccctccccaaatcgcctccgtcaaacgaaatcgtaacactgtgacgattcccgtcacacagacttcgttcgctcctcattggcatcttaccgtgttgcatgcggcaaaacagccgcgcaataatgtgcggcgagcgaacttcctatcgtccgccgcacaaacacattgttaccgggaataaggtgtatcatgcactggacttataaaatcgccagtatattggccgtggctctcatcactctcgcagcaggattctatgcgcagaataacgaagaaacctatccctccggccctagctacgatattggaatttccgacgcgcacgggcagactctatcgacattgaccggtctcgcagcgacccatcatgtcggactcgcgagagtctcctatgagccggacggtcacggtaccaacagacgcgtaatttctattttcggcgcattagacggcaacggcatgcatgcgaattcgccatacccggattatgggttcgggccgcgcacacgtgtgca

SEQ ID NO: 3012 - DNA, 3751 bp, Unknown
  R19_24m  MAG No. k141_14627
accgcacgcccccgcgccgtcatcatcggcatgatgggagccggcaaaacacgtgtcggtaaggaagtggcgcatatgttgcgtctgccgttcgccgatgccgatgtggagatcgaacgtgaagtgggcatgaagattcccgcctacttcgatgaatacggtgagccggcattccgcgaggtcgaggccgatctcatcgccgatatgcttgaggatttcgacggtatcttttcgctgggcggtggcgctcccatgacgccatccacccagcatgccctcgcctcatacatcgaccatggcggtcgtgtggtctaccttgacgccgatccggcggaggccatggaacgcgcgaaccgcgggggaggccggcccatgctcaatggcaatgccaactcccgttggaagaaactgttcaagcagcgtgacccggtattccgcgaggtcgccaacgttcatgtccatacccgggggcttacgcctcagggcgcagcgaagaaagtgattgatatggtatctgagcgagcagtgcatgttaccggatcggcaattgagccgtatgatgtggtcattggcgaaggtgccatgaaccatctggccgacgtgctgggacccaaacccgccaaaatcgcgcttatccacactcagtcggtgcagcgacactccgatcgtgcccgcgccctgttgcgtcagggcggctatgaggtttccgacatcgtgattccggatgccgaacccggcaagaccattaccgtggccaacggcatttgggaacgccttggcaacgaaggtttcacccgatccgatgccgtggtggggcttggcggcggtgccgcaaccgatttggccggtttcgtggctgccacgtggatgcgcggcgtgcgctatgtaaactgcccgacctcgctgctggccatggtcgatgcctccaccggtggcaaaaccggcatcaacaccccgcagggcaagaacctcgtcggctcgttctacacgcctgccggtgtgctggccgacaccaagacgctggctacgctacccaatgacatcttcatcgagggtctcggcgaagtcgccaaatccggtttcatccgcgatcccgaaatcctgcatatcctcgaagaccacgcagctgaactgcgcgctttcgacggctctacattcctcggctcgccgctcgaagacgtggttgccgagctcattgagcgcacggtaaaggtcaaggtctaccacgtctcctccgatttgaaggagaagggtcttcgtgaattcctcaactacgggcacacgatgggccatgccatcgaaaagctcgagcacttccgctggaggcatggcaatgcggtggccgtcggtatggtgtatgccgccgagctggcccatctgatcggttacatcgatcaggatctggttgactatcaccgttcgttgcttgcttcgctgggtctgccgacgtcgtggaatggcagctcgttcgacgacgtgctcgcattgatgcatcgcgacaagaaagcccgtggcaacgaactgcgtttcgtggtcctcgacgagattggtcacgtcgtacacctcgacaacccgcccgccgaagccgtagaagaagcattccgtcgtatccagcagtaattgaacggccgtaggccgtgccgttcgccatcccctcagaaaaagtacttggctcccctctaacggaggtgccccggagtcggatttaccttctacctccctctgatgagggaggtgccccgaaggggcggagggagagaagcacaaacaaaaggagtcccaatgaccaaagtcattgttgtcaatggccctaacctcggacgtctcggcgtccgccagcccgacgtctacggtcgtcaagacctcgacaccctgcgcaagctctgcgctgaatggggcaaggacctcggcctcgaagtcgaggtgcgccagaccgacgacgaagccgaaatggtgcactggatgcaccaagccgccgacgagaaaaccccggtggtcatgaaccccgccgccttcacgcactattcgtatgctctcgccgacgccgcgcacatggtcattgatgagaacctgccacttatggaagtccatatttccaacccgtccgcccgcgacgagttccgcaagcgttccgtaatcagccctgtggccaccggcaccatcaccggcatgggtttctacggctacaagctcgcgctcgatgctgtggcgcacttgctgagcgaatagaaccaagccctccagccaatcccgggtatcagtcgacgttgagcccgggattcctgttccgacgaatcggaccagaatcctcgtcctggtgcgccctatggacctgaagtgcgccgtgtattcgaccatatgctggccaaggcaggacgagacgggctgcctacgcgcgactacaccggccacgtcatgaacacgccgggtcatacacggatgatagagtggaattccatggttagaagaacacatggtaattctcaagagcacgtcaccaagcatattttcgtcactggcggcgttgtttcctctctcggcaagggcctgaccgcatcttcgctcggtcgtttgctgcgcagccgcggcatccatgttctgcagcaaaagctcgatccgtacatcaacgtcgacccgggcaccatgaacccgttccagcatggtgaggtctacgtgaccgaagacggtgccgaaaccgatctcgacatcggtcactacgagcgtttcctcgacgtcttcctgagccagaaggccaacgtcaccaccggtcagatctatcaggaagtgctgcgcaaggagcgcgccggcgaatacctcggccagtgcgtgcaggtcatccctcacatcaccaacgaaatcaagtctcgtatgcgcgcccaggcttccgatgacgtggatgtgatcatcaccgaaatcggtggtactgtcggcgacatcgagtcccagcccttccttgaggccgcccgcgaagtgcgccgcgatctcggcccggacaactgcatgttcgtgcacgtttccctggtgccgtacatttccgccgcccacgagctcaagaccaagcccacccagcactccgtgatgatgctgcgtcagctcggcatctccccggacgccctcgtgctgcgttccgaccgcccgctcaaccagtccatcaaagacaagatctccctgatgtgcgacgtcgatgccgaaggcgtggtcaactgcgtggatgcgccgagcatctacgatgtaccgaagatcctgttcgaagagggccttgatgcttacgtggtgcgtgagctcggcctgccgttccacgatgtcgattgggatgaatgggcagacctgcttgagcgcgtccaccaccccaagcacgaggtcaacatcgccatcgtcggcaagtacatcgatctgccggacgcctacctgtctgtcaccgaggccatcaaggccggcggctttgccaactgggccaaggtcaacgtcaaatgggttgctgccgaccgttgcgaaaccactgaaggcgcggccgccgctctcgacaacgtcgacggcatcgtgatccccggcggctttggcattcgcggcatcgacggcaagatcggcgccctgaagttcgcccgtgaaaccaagctgcccgcccttggcctgtgccttggtctgcagtccatggtcatcgaatactcccgccacgtgctgggcattgaagacgcgaactcttccgagttcgagcccgattgcgccaacccggtgatcgccaccatggaag

SEQ ID NO: 3013 - DNA, 14760 bp, Unknown
  R19_24m  MAG No. k141_14779
ttcagcacaccttccacatccagttgtgcgggtcctcgacttcgccgagctggatgccgagcagctcgtcgcgcagttcgcaggtgagcttgccggagccgccgtcggcgacggtgacgtcgaacttctcggacttgaagcgaccgatcggggtgatgatggcggcggtaccgcaagcgaacacctcggtgacttcaccggacttgatgtcctcgagcagctggtcgagggcgatcatggtctcgaccacgtcgtggcccttgtcctgcagcagctgaatcagagagcgacgggtcacgcccggcagaatgttgccggtcagggacggggtctccacgtggccatccttgtgcacggccatcatgttcatgccaccgagctcttcaaggtaggtcttggtggcggcgtccacaaagcacacctgctcgcagccattctcaacacccttgtactcgccgagcagggaggcggcgtagttgccgccgcacttggcgaaaccagtgccgccagggccggtgcggaaccacttgtcttcaacccagatgctcaccggcttgacgccgcccgggaagtacgggccggacggagaggcgatcacgcagtagtcgacctcctgcggggcgcgcacgccgaggaacggctcggaagcgaacatgaacggacgcatgtacagcgtgtactcgcggcgggacggcacccagttggcgtcgcgcttgaccagcgcggccacggaaccgaggaagtcgtcaatcggcagctcaggcaggtacagacgcttggcggagttctggaaacgctcggcgttcgcatccgggcggaacagccaggtggagccgtcggcatgacggtaagccttgaggccctcgaagcactcctgtgcgtagtgcagcacggaagcacccgggtccatcttgagcggtgcgtacggttcgacgcggcggtcggaccagccttcgcccttggtccaagtcatgtgggtcatgttgtcggagaacacctggccgaaagccggcttgtcgatgagggactggcgcttctcatcggatgcggggttgtcgttcggcagtacggtgaacggttcggtgagcttgtcgagtgctgccggatcgtggtgcgtgttttcagtcatcactagctacttcttcttgactttggcggcccgaaagccaccatatggggtgtgtgctgtgcgcttgtggcgcgaactctgttgcatacttttgcacacccatgtgttactcgtgtggcagagttcacatggtgaaaaacgaagaagcccacaccgttctcaacggctgcgggcttccacgtttcagttatgttctgaattgttcgctatcgaagcgaccgactcacttggcgtcggcagccggagcagcggcggcgtcagccggggcggcagcagcttccggagcggtggtggactcggtggcatcctccggcacctcgacggtgacgacggactcttccggatcctcgacgtccagctcgacgccctcaggcaggacgacatccttggcgaacaccttggtgccgtcggtcaggccttcgacgctgaccacgatcttctcgggcaggttggtgacgtcggcacggaccttgagctcctggatgtcgacgaacgccacggcagcacccttcggggtgccttccacgaacaccggcacctcgacgtcgatcttctcgccggccttgacctcgaggaagtcgatgtgctcgatgatgcgcttgaccgggttcttctgcacatccttgacgacggccatcttggtgttgccgtcgaaggcgatggtgaacagggcgttggtgtgacgcagggccagggtggtctcgcgcatcggcaaggtcacgaaggcgggctcttcgccgccggcgtagatggtggccggaatcttgttggcaacgcgcagacgacgagcaacgcccttgccgaactcggaacgggcctcgccctcaagcttaatggtggtagccataatggatactccttgtatcttcgtttcgtactgtctcgctcagacgccacgacgcgccgaaagacaccctacaaggagtgaaatacgccgagtcgataacggaatctgtgtcatgtgtcagcatgcacacttccctcgccaaagcaacaattgtcaagtatacgccaaccccggactttgcgtaatgatgcttcgatgacactgcatataggccgtcccagctacgtcaacgtacggtttccgcgaaataatccctaactttgtgaagaacgtacgcttacccgttctcatcatacggttttcacgaaatcgttcgccatttcgtgaaaaccgtacgctcagcgacactcagtgtacggtctttcacgaagttggggatgatttcgataataacgtacgatggtgagtaccgtatcgggaggttgatatgactcgttcggacgacgtcatcaatgaggatgaccatgacgtcatcgccgcacacactcgcgttgtcaggggtatggctgcggcacttgccgcgatagccgccaccggagccggcgtcacagccgcggccgccaacgtcatgttcatgttcgcgctggacaccaaggccaaacgttcgatgttcaacatgccgcacgaggagacgccgaaaggcatcgaattcgacatgtccgagcagcttgaggccggccggtggttcgaggaggccaagcaatcggtcacgctgcgcagccatgatggatggaaactccacggctggctgttggacccggattgttccgacccacagccgcatctatacgcgatctgctgccatggctataccggagagcccgcggaaatggccaaatgggcgcatcgctatgcgcaactcggttttacggtcctgctacccgcgcagcgcgcccatgaattgagcgaagggcgctacgtgggtatgggattgctggaaagcgacgatctgttgggctgggtttcgctgatcaccgcagctgatccggatgcacgcattctgctgcatggcaattcgatgggcgccgccacggtgatgatggcggccggcgatgcgcgactcccccgcaacgtcgtcgccgcgatttccgattgcggatacagttccgtggtctcgcagtttacggataatgccgaggcgatgttccatttgccgcactcgttggccgtgctgctggtcaaagtggccagtcatgtgtctaaacgcaaggctggataccggtttgaggacgcctcctgtgtgaaggcattacggcacgcgactattccgatgatgttcattcacggcggagcggatacttttgtcaatccgaagtatctggacatcaattacaacgcctgcgccagcatcgaccgcgagaagctgctgattcccggcgccgaccacacgatgagcgccagcaccgatccggaccactattggcgtcgcgttaacggctttgttaagcgggtgtttgggctgtagtagatatagaagcttggctcccctctgtgaggggagccaagaatggttacgcgagcagttccttgacggcggcgatgacggactgcagactcttcttcgcgtcaccgaacagcatctgggtgttgtcctcgaagtagagttcgttctggatgccggcgtagcccatgccgcggccacgcttcatgaccacgacgttctgggacttgtcgacgtcgagaatcggcataccggaaaccggggtgccaggacggcgagcagccgggttggtcacatcgttggcgccgacgaccagagccacgttggcctgcgggaactgcgggttgatctcatcgagatccacgagctcctcgtagggcacgttggcctcggccagcagcacgttcatgtgaccaggcatacggcctgcgaccgggtgaatggcgtaggagacttccacgccatggcccttgagcagttcgccaaggtcagcgagctcgcgctgggcctgagcctgagccagaccgaagccgggcacgaagatgaccttctgcgcgtagacgagctgaacggccagatcgtccggcgtggtctccttcatggtgccttccggaccgtcgccagcagcggcggcgtcagcaccaccgccgaagccaccggccaagacggagagcagcggacggttcatggcctgagccatgaggatggacagggtcacacctgcggaaccgacgagtgcgccggccacgatcagggcaacgttgtcaatcgccagaccggacatagccacagccgtaccggtgcaggcgttgagcacagagatgacgacgggcatatcggcgccgccgattggaatcacgaagaccaagccgtagcacagggcgaacacggtggtcagaatcgaccacagcaggcgctgttcgggctggacgcacagcataaccagcgaaacgacggacagcacggcgaacagaatgttccatacgcccttgcccggcaggttcagcttcttgacccacttgataccctgcagcttgccggcggcgatgagcgaaccggtgaaggtcacagaaccaatgagaataccgagaccagcggtgatgagcaccacgatgtccggggtgccttccttggtcaggatgtcgttcagggccacgagtgcggcagcgccaccacccacggtgttgaacacggaaaccagctgcggcatgtcggtcatcttcaccttcttggcggagacgacaccggccacggcaccgatcaggatgccgacgaccagcaccaccacggcgacaatgttcacgaagcccttggcgaaaagcacgatgaacgccatgagcacggccacgaccatgccgaacgcggagatctggttacccttgcgggcggtcttcggagagttcatgaagtgcaggccgaccacgaacaggacggcggagaacaggtagacgaaccatgcgacgatgtcgatggcgccaacggttgcggaggtcattacttcgactcccccttcttctcgttcttgctggacttgaacatctcgagcatgcggtcggtgaccacgtagccaccaacgacgttcatggtgcccagcacggcggccaggaagatgaacacgtaggccagtgggctattggcttcggctgccacgatcacaacgccgacgatgacgatgccgtggatggagttcgcgccggacataagcggcgtgtgcagggtggcgggcaccttgccgatgacctcgataccgatgagcagcgcgaggacgaacagggtaatggaaacgacgagagtaggcatggtattccttcttccttacttctcggacttctcggcatcggcagcagctgccggggcggcggcacgaccggcaaccaccagcgcgtcgtcgagttcttcggtgagatcctggccgagcttgccgtcacgcacgaagtgcacgaggatgtcggccacgttgcgcgaaagcaagttggatgcggtggtggcgacgccggaggccaggtagggagcgccgatcagcttgacgccgccctcggtgatctgctcgccgacggcggagccctcgacgttgccgccgaggtcggatgcagcgcagtccacgatcacggcaccacgcttgagacccttgacgccggctgcggtgagcagcaccgggggcttgcggcccgggaccttggcggtggtgatgatgatgtcaaagccggcggccttctcatcaacggcagcctgctgctgagcctgttcttcggcgctcagcgcgcgggcataaccgccctcgccctggcccttggagaagtcaagtcccagatcaaggaacttcgcgccgagggactcgacctcgccctgggaggcgggacgcacgtcgtacgcggtgacgaccgcgcctagacgcttcagcgtaccaatggcctgcaggccggcgatgccggcaccgagcaccagcgccttggccgggcgaatcgtgccggcggcggtggtcatcatcggcaggaaggaaccgtaagcatcggcggcggtgatggctgccttgtagcccatcacggagttctgagaggtcatctcatccatggactgggcgctggaaagcttacggggtagcttttcgatggcgatgcccaccagaccggccttctcgagcgcggccacgtaatcggcatcggtgaaggaaccgagcatgccaatgacccactggccggccctgagcttggccacggtctcggcggacggacggtccacaaaaccgagcgcgtcggcttcggcgagcacctcgtcacggctggtcaccttcgcaccggccttttcgtaatcctcatcggtgtattcggcggcaatgccggcaccggcctcaataatcgaggagactccgctcctcttcagccgggtgacgatatccggcgtcagcgcgacgcgggattccgtttcggacgtttcgttcaaaacgccgaacaccacggtggcttctgggttttgcgccatgagagccctttcttgttctacttcaaaatggacatggttatccgcatagaaagtgtagtcggaaggtaaagaccatgacttgagattccgccaatcgaaacagaaacgaacccgaaattagtgagaaatacgaatgtatccatgtgcattgcggatgaattgctcggaagtcgtccaacaatcacccggcatcgatcagcaaccaaccgctcagtaattatcgacaatcaccgtttcgtagctcacggttactcaacaatatcgggacctgtgcaatattttgccacgcactcccctaacccgccagaatcctacggttgcgtaaggtgacgagttcggtttgggcgattacaatttgaactttgagaagcgttcgcctcatggctggacgacactgaaaggtttacaggagcaagacttgtcggttatcaattccttcacgcagcacactatcaatctcacccgtaaggcgctcaggttgggatccgacttcgtccacccggtccacgacgacaccccggacgagcccgattacctgtctaacgccgacgtgccggtcgagaccaatatcgctttgcctcacagcgacgattgggacgacggccacctgaccgtcaccgacatcgaccccatcaccggcctgctcaccacctccaccgaaggcaatccgccgctggacgaaggtacgtccatctacgacctgtatgcggaccgcgccgaacgtatgggcgatgagccgctgtacacctacaagtccggcaacgattgggtgaccgtcaccgccaacgagttcctggctgacgtgcgtgccgtggccaagggcctgattcattacggcctgaagaagggcgatgccgtggcattcatgtgccgaacttcctacgactgggacctgaccgacgcggcgatcatggcgtgcggcggcgtgctcgccaccatctacgacaccgattccgccgagcagattcgcaatatcgtcaacaactccgatgcccgactgctgatcgtgcaggacacggacatgcgtaagaaggcggatgggtccgtcgaagagtgcccgtccctggagcacatcatcaccatcgagaccggtggcttggacgaaatcaaggcctacggcaccacggtctcggacgaggagctggacgagcgcatcgattcggtcaagaagaccgacctgtgctccatcgtgtacacctccggttccacggccgcgccgaaaggcgtggaaatgacccatgagcactactgccagaccgcgctgaatctgccggcctacatgcccgatctgctgcacgacaagaaaaacaccatcctgctgttcctgccgcaggcccattccttcgcccgcgccatcaactacatcgtcgtctcctcgaacgtccgcatctacatcgccaccggcatcaagacgctgatcagcgatctgcaggtggccaagcccactctcatgatcgtggtgccgcgcgtgctggagaaggtgtacaacgccgcgtcccagaaggccggccacggccccaagggcgtggtgttcgcctccgccgtggtggctgcgcagaactatatgaaggaagtctccgccaacggcaaggcaggtgcactgacccgcactcgccgcgctgccttcgatccgattgtctactcttcgctgcgcgaagtgctcggcggtcgcgccaagtggattgtggccggcggtgccccgcttgacccggaactgctggctttcttccgtggcgcgggtgtgcctgtatacgagggctatggtctgaccgagaccaccgcaccgtgcgcgttcaacccgctgggtacgccgttccacgctggttccgtgggcatcgcattccccggattctccctgcgcatcgccgaggacggcgaaattcaggtcaagggtcgtgctgtgttcccgcgctatcacaagaacgacgaggccactgagctgtcgttcaccgaagatggctggtatgccaccggcgatctgggccgcatcgacaacgacgggttcctgtacatcaccgggcgcaagaaggacctgatcatcaccgccggcggcaagaacgtctcccccggcccgatcgaggaggtcatccagcgttgcgagatcgtctcccaggcgttggtgctgggcgacaaacgcccgtttatctccgccctggtgacgttggacgagaagtcgttgcgcccgtggctcgccgccaaggggcttgacgagaacatgtccctcgaggacgcggcaaggaacgccgccgtgcgcgccgaagtgcagcagtgggtcgatcgggccaacgagggagtctcccgcgccgaatccgtacgcaagttcatcatcctgcccgaggagttcactcaggagaacggcctcatgaccgcttccatgaaggtgattcgccccaaggtcatcaagcgctactccaccctcctcaacacccagatgtacaccaagcggaagtaaaccgtatagcaaaagctccctctgacgagggagcttttttcgtctatacgccctagaagccgaggcgttctagttgcttggggtcggactgccagcctttggctaccttgacgtggaggtcgagcttggctttttggccgacgatgcggttgaccggggtgcgtagcttcttcttgacgtaggtgaggttcgaggcgcccttgccgatgatgatcggcttctgtgagtcacgctccacgtaaatggacacgttgacctgcgccttgccgtcatagccctgaccggtctcgttgtcttccggatagtcgatggaatcgaccaccacggccagcgaatgcggcagctcgtcgtccagggtctcaaggaacgcaccgcgcacgagttcggcgatggtgtcttccggacgctcctcgctgatctgatcgtccgggtacatctgcgggccctcgggcgtgtgctcaatgagcacgttcttcacttcagccagattgtcgtgcttcagggcgctcaccggcacgatgtccgagaaatcggcgaaatcgttgatttcgatgagcttgttgatgagttgctgacggccaagctcgtcgatcttggtgacgatggcaatcagcgggatgcgccacttgaacgtaccgtcctcacgcttggtggcgaagtcggtacgcagtcgggaaagaatacgcttgtcgccggggccgatttcctggtcggcgggcagcaggaaggccaccacgtccacatcggccaaggattcgtcgaccacgtcgttcagacgctggccaagcaacgtacgcgggcggtggataccgggcgtgtccacgagcacgagctgcgcgtggtcggcggtcaggatgccgcgaatcgccttacgggtggtttccgggcgagaggatgcgatggcgatctgcttgccgatcaacgcgttgatcaacgtggatttgccgacgttcgggcggcccaccacggccacgaatccggagcgatacggcacgtcctgcttggtcacattctccgtttcaccggtcgcgtcgacttcggcaacgccggcaacatcggaagcatcggtgacgtcaatgtcatcgacgtcgttcgtgctgttgttctggtcggtcatatcactccttgctggcggtatcatcgccttcgacgggctcgccgtcagtttcctcatgggtcctgctattttcctcgccgccctcgacgtgcgccggttcgacgacgatggtggacaccttcttgcggcgtccggcggagtccacggcggtcagtcgcagaccgcgcgtcacggccgaagcaccgacaatcggcacgcggcccagaatcttggtcagcaggccgtacacggtatcgacatcgtcctcatcaatgtcgatctcgaagatctcctccagatcggcaatcggcgtacgggcgggcatcttccacttgttgtcgccgattttctccggctcggtacgctgggtgcggtcgtgctcgtcttccagctcgccgacgatctgttcgatggcatcctcgatagtcaccatgccggcgatgccgccatactcatcgaccaccacggccacatgttggcgggaacgctgcatctcatggaacaggtcgtccaccggcttggattcgggaacaagcagcggctgccggacgatggattcgaccgtgcgttccatggccgccgggttgaaggcggtggcgcgcacggcgtccttcaaataggccacgccgatcaggtcatccacatcctcaccgatcaccggcacgcgggagaaaccggagcgggagaacagtttcagcgcggaagacagtgtggagtcgcgctccatgcagatcatatcggtgcgcggcaccatgatctcgcgagtcaacgtatcagacagggtgagcacgttgcgcaacatttcggagacttccggatcgaagtcgttggactccaccagccggtcgatggcggccttgccctgctcgagctgaatcttctcaagctcctcgtcgtcggacagatcggagtccttggagcgacggcccgaccccttggaaccggacttgtcgccaccgatgcgtgcgaacggcgtgagcttggtggccaacgacacgatgcacgagttggaaatcatgatgtcgaccggcttggtcatgccggcggtgcgcgggcggaccagtacggagaccacggctacgataatcgcgaacaggaatccggcgagcagttcaacccacagttccgcaccccacagggatgcgatggaagacaccagtacgccgtcgagcacattgcaggcgatgcggaagaacgcacagctgccggcggtggcgtaacggtcggcgatgagccgttgcacgcgatgaatcttgtcgatcttcttcatcttgaggaactggcttgcttcggagtcggtctgcacctcgaggatgagattgttgaggctggctcgcgttacgcgggccacggcgccttcagcggcggccatggtcagcgaaagccagacgaacagggtcgccacaagtacgagaatgacggtgacggcgatcagcgtggtactggaatactccataatgttttttcggtgtccttgaatgtccttgaacggtatagaataatccgaatttggtgtgattgatttggaagtttatttggaatcgaggtcgcggccagcaccgtgcgcggcgtcgtacagggccagcgcgtcgggtgtgccggcgggcagcgtggcctgcacgttggcatcgtggcgcagggcgaagaaggtgagcagcagctgtcgctgcaggccgaacatctggcgctcctgctcgggggtcacgtggtcgtagccgagcaggtgcaggatgccgtggatggtgagcaatagcatctcctgcatggtgctgtgcccggctgcggcagcctgttgggcagcgacccacgggcagatgacgatgtcgccgagcactccttccatcacggttttgccgtcgcctgggcgcagctcgtccatcgggaagctcatcacgtcggtcgggccttcgaggttcatccaacgcatgtgcagttcggcgatgggatcgggatccacgaacatgatggtcaggtcggactgggtgctcacgcgcatctggtcgagtacccaaatacccaaatcggagaagaccttggggtcgatgacccactgggtttcattggtgacgtcaacgctcatcgtctgtctcattttggttggttgaatccgtttgctggcgggcatcgaagtcggtatggttgcggcggcccttgtgttcgatgtcgcggtggtcgccggcgatggcggagtgacggtcgtaggcggccacgatctggccgaccagctggtgacgtaccacgtcctcggttttgagatgcacgaatgcgatgtcgtcgatgccgcccaggatgcgttcgatggtggccagtcccgagcgcggcacggtcaggtccacctgcgagatatcgccggtgatgaccatcgtggagttgaagcccagacgggtcaggaacatcttcatctgctgttcggtggtgttctgagcctcgtcgaggatcacgaacgcgtcgttcagcgtacggccgcgcatgtaggcgagcggcgccacttcgatggagccgtcgtccatgtaccgcttgagctggtcggcgccgagcatgtcgccaagcgcgtcgtacagcgggcgcagatacgggtcaaccttgtcgttcagcgtgccgggcagaaagccgaggctttcgccggcctccacggccgggcgcgtaaggatgatgcggcgaatctgcttgtcctggaaggcacgcacagccttggccacggccagatacgtcttgccggtgcctgcgggaccaatgccgaaggtgatggtgtgcgattcgatggcgttcacgtaggccacttgtccggcggttttcgcacggaccggcacgccggcggcaaaggtgatgacgccgggaaccgtgggcttgcggtacgtcgggtcgtgggagccggcagaacgtgcatgggcgcgttcgtttgaggtcgattgcgccagtttgtcacgcaccgggccgtgacctggatgttcgaggcgcacgtggttcttgagcacgttctggtcgagcatgcgacgcacggtgtcggcgtccataggcgcggtgtaggcggcttggatgatggtgttgaccaaatcctcggcctgtgcggcctgggcttcggtctgcttggagcgggagacgatcgccacgcggttgccgcgcacgataatcgtcaggtccggaaaggcgcgctccacctcgcgaatgacctcgtcaaccgggccgagcacggcgacggggtcaagttggggcgggatggtgatggtacgtgtagtcgttgccacgaagcggatattcccctactactcgtcgagcttttcgccggtcatcacgtgcgcgtgcacgtggaagacggtctggccggcgtcgagaccggtgttgaacaccagtcggtaggcgccgtgaaattccttgtcggcgatgttctgcgcgatggagacgatgtgggccagctcggtcgggtcgtcggcggcaagttcggcgacgttggcgtagtgcttcttgggcaccacgagcacgtggaccttggccttggggttgatgtcgttgaatgcgtaggtcgtctcgtcctcgtagaccttgctgctgggaatctgccctgcgatgatcttgcagaacaggcaatcgtcggattcgctcatcatgctccttggtttgatgttgctacgcaccagcttagcgcgtgggcgttactcgtaacgtcccaacacccgagacaacagcgacaacgctacaggaccggccgtcgcggctctcagaatattgtgccccagtacgcagctcaccgctccggccttgacgaaatcagctacctcctgctcactgatgccgccctcaggcccgaccaccacactgacagtccgcggccggccgtcctggagcgtgcgttccaccaactgcgtaaccttctcctccacgccggaccacgtatcggtagcatcctgatgcagcacaatcaccacatcgccatgcacgcaggccctgcggcagatggccacgacctccttgctggacgcgcacgcctccagttgcggcttaaaagcgcgccgcgactgctcggtggcggcatccagtaccgaattccacttcttgtccgtacggccgaccttccacttggcaatggatcggtccgcctgccatggcaccacttggtcgacgccaatctgcgtagccatatcgatggcctgctcatcatggccggttttcgccaatgcctgaatcagcgccaaacgggtgagcggctcgggttcgcgccccacttccacaacttcagcaagtccggcttcaggatcggccatcactgcctggattctcaagccgttgccgtcggaaagttgcaggctgtcccccgccttgagtcgcatagcctgcacagcatggcgcttgatgtgcgcgggcagggttagcttccagccggcgtgaagttcgtcgctgttcaccgggacatcgtcgacctgcgggtcgaaaagaaaaagggcatcagtcatgacttcaaggctacacgcgacacgccgggcacacgcgcgaattgcatccctgtaatttcatgctaaactatttactcgttgtccaaacgacacctgcccgggtggcggaatggtagacgcgctagcttgaggtgctagtgcctattttatacgggcgtacgggttcaagtcccgtctcgggcacagataaaccccttgcattgcaaggggtttttcgttatatgcacacacgaaaggccaccaatgcagttcatcacgctggacaccgttgacgacccgcgcgtcgaagcgtatgtgagcctcaccgaaatgcagttgcgcaatcgcttggaaccagccaagggcgtgttcatcgccgagtcccccaa

SEQ ID NO: 3014 - DNA, 6853 bp, Unknown
  R19_24m  MAG No. k141_15112
ctaccgccccacggcggcccatgccacgggatgccaccgcaccggcattccggctgcggcaccgggcatgcagcgtcacggccgcatgccgcgaggcatcacagcttcgcggcgaaccagcgcgtgatcgtcgtcggatgcgtgatcgcggtgcccaccacggcggcccacgcgccgcattccatcacgcggtgcagctggtcgggcgtgtggatgcgcccctcgcacagcaccggcatgtccgggaacgccttgaccatccgctcgagcagttcgaagtccgggccgtcggtcttgagacgctcaccggtgtagccggacagcgtggtggagatgatgtcggtgccggcctcgaccgcacgctcggcgtcggcgaaactgccgcagtcggccatcgtgatcacgccctcgtcgtgcagtgcgtgcacggtgtcggcgtagctcagaccgtccgggcgaggcctgccggtggcgtcgatcgccacgatgtcggcgcccgcggccgcgcagcaacgggcgtggcgcagcgtcggggtgatatagacgccctcgtcgccctccttccagatgccgatcaccggcaccttcacctgccccttgatggcagcgatgtcggcaagtccctgacagcggatgcccaccgcgccaccctccaccgcggccatggccatttgggccatcgtctcggggtggcgcagcggctcgcccggatacgcctggcagctgacgacaagcccgcccctgatcttttcgattacctgatgcatgatgcgcttcctttcctcatgccttgacattgcttcatatgggtgttgacgattgcgcgacggattgccggagagcgccggctcggggtcctcccgaggggagtcccagcccggcggcggatcacgggcggccctgcgcgacatgcctgcgcacggccaccgcggcgccgatcagcggagcggcgccgcccagttcgccctccaccagcggcgcggacctgaccagctgcaatgcggaatcctcgaatcccgcgcgcagggcgttccaccacagggggccggccttgaccaccgacccggaaacgacgatgacgtccgggtcgatgagattgcccatgccgccgatgcactcgcccagcgcacgggcgctgtcctcgatcacgccgacggccaggggctccccagcggccgcgcgcgccgcaacctgggagccgtccgccaccggttcgccctcttcggcatcgcaacgggcgttgtagaggtctttcaacccggttcccgacgcgaccggctcgatgtgcccctcgagggtgccgcacgagcataggaatccgcggcccagcgcgctcggcacgtgccccgcgtggccggccacgccgtgcgcgccggtgaacagggcgccatccaccacgatcgcgccgccgatgccggtgcccacgccgatcgagagcaccacgcccctgccgcgtccggcgccgtacgtcgcctcgcccagaccgtgcgcgcccacgtcgccgatcatgtgcaccggcaggtcggtcacggccgcgaacgcgtcgtagatgcgctggccgcgccagccgggcaggatgtccgtggcggagacgatctcgccggtttcactgtccggcacgccggccgccgcaatgccgacgccggcgatcgccacgccctcggcctcggcgcgctcaagctggcggacggcgaaggcgacgatgcggttcttcaggtcctcgccgccgcgcgcggcctcggtcgggatttcgcagcgggccgtcacctcgggcctgccgtccgcgcccgcgtttgcgtttgcgcttgcgggcaacgtcacgaatcccgaggcgaccttggtaccgccgatgtcgaaggcgaggtaggtgggcgccgcccccgcgctcatgcgacgaccgcctcgtggatgcgcgcgagatagtcgaggcgctcctcgaccgtcgcggccttgggcacgcacaccttggcgcccagatagtcgagcgggcgctcctgcgtcccggcggcgcgcacggcggccttgatggcggcggcgtccatgagcgaggtcggctcgtccgggttcatgggcaggtggccgtcgatccagccgtagccgtactgggtctcctccgggccggcgccggagaacatgaggccgctcagtacgccggccttcgcggcggcctccacgtgcgccacggcggtttcgggtgtgcgcccctccaccaccgagcgtccccagttgacggtgagcccgatgccggccgacccgcacagcgcgatctcgtcctcaatcggcaggaagcccttttccggcttctgcccctcgacgtacttgtcgcagtgctcgatgaccagcttggcgccggaccagtccagctgcgcgagggcctgcaacgaggcggtcatcgcgtcgcggctggcaatgcgcgtgggcgccgtgtggatttcgacgaacttgacgtcctggctgccccgccactgtgcaaagtcggcgagcgcgtcgcgcagctgcttgaagaacgccagagcgaaccggcgtccgtcctcgtccgggctggccagtccgaagttcgggtccttccatacgtgctgcatggtgcccggaatggcagtgaccgtattgttcttccaatgcctgggcagttggccggcaagccagatgcggtcggcggtttcggcaaggtcccccgggaaggggatctcggtgccgtcgatccagggctgaccgcccagcagatcgtaataggcttcctgggcttcgcgcccctgcggcaatgacgcgtacgcgccgacgacgaatgatggcatcgctttcctccttgaaatgcccgatgcgggttcgctgagcattcctatcgtactatcatcagacatctgatatctaatctgttaaaggcagattacttcggcgtgtcttctctcggcctgccgaccttagcatcatgcattcgcttactatgcttgcccccccctggaggggaaccagaaattatcaacaaatagtgacatgggatgctaaccgcggccagccggtgaaatggcatgcgcttatacggtttcaccggctggcgcccgctacggcggagttttcgtatggccctgtacgatttcaccggctgacgggcacccagccggagtttccgtatacggtcatacgatttcaccgtcttagccgcagccagccggtgaaatcgtatgtggactccgtgcggcaacaagtcagcgggcaagcggcacggccccgacaagccgcgcaatccgctcactaacggaacagcgagacgcccctgcgggccatgcagaatgcgttgccaagccacgtgtgcttggaattcggccacaccgcaccgagcctcggggcgttctggctcagccagatgctgggcacgcggccgtcggcgctgcgcgagcccagcaggttgaacccgtttttctcctgaagccagcccggatgctgcgtggcgatggccagcccctcctcgagcgtgagcggaatgcgctcgtcggagtcaatgagcttgcgggccacgtcgggctcgcggtttgtgtgtacttggtaccggtgcgcggttccacgacgatgtagaacggtccctcgggcggctcgaagccgtcctgcggcaaaaagctcgcgatgtcgcgcggcggcatcgtggcgaaaccggccatgcggttgatcgacgtacgggaaatcagcgattcgggcgacaccagctcgcgcgtgggcgccagcaggatgcgctcgtcaaaatcggtatgctccagcgcctcgatcagcggacgggccagggagcggaacgccgcggcgctcacatccgccacgtccgggtaccccaatgccacgatgcggtccaactggcgctgcgcttctaccgacgccttcgacatgactcccagtgcagagcatcgcggcggggcggcgccgtgacgttccagccggttccggcgtcccgtcgcaccggcgatccggcccagcatacgggcacccggttcttcttgttccgcccgattcgtaagattgatggatacgtgtggccatttcgctacggctgcccgaacgtgaaatcaatccgtcaaacccagaaggttgttatgtccgaaaagttgaaagtcggcattctcggcgccaccggtatggtcggtcagcgttttatcacgctgcttgagaatcacccgtggttcgaggtggtcacccttgccgcttccgcgcacagcgccggcaagacgtatgccgaggcggtcggagaccgttggaagatggaaaccccgatgcccgaatacgtcaagaacatggtggtcgtcgatggcgacgatgccgagtccgtggcctctggcgttgatttcatgttctctgcggtaaacatgccgaaggaccagattcgcgccattgaagagcgttatgccaagaccgagaccccggtggtctccaacaacagcgctcaccgttggaccccggacgtgccgatggtggtgccggagatcaacccggagcacttcgaggtgatcgagcaccagcgcaagcgcctgggcaccactcgtggtttcatcgccgtcaagccgaactgctcgattcaggcctacacgccggcactggccgcatggaaggaattcgagccgcgtgaggtggttgtgagcacctatcaggcgatttccggcgcaggcaagaccttcaaggattggcctgagatggtgggcaacatcatcccgttcatctctggtgaagaagcgaagtccgagaaggaaccgctcaaggtgttcggccatgtggacgccgaaaagggcgagatcgtgccgttcgacggcgacctcaagatcacttcgcaatgcatccgcgtgcccgtgctcaacggtcacaccgccaccgtgttcctgaacttcggcaagaaggccaccaaggaagagcttatcgaccgtctggtgaactacacgtccaaggcttccgagctggagctgccgcacgcgccgaagcacttcatccagtacctcaccgaggatgaccgcccgcaggtcaagctcgacgtggactacgagggtggcatgggcgtttccatcggccgtctgcgtgaggattccatcttcgattggaagttcgtgggtctggcccacaacaccctgcgtggtgcagccggcggcgccctcgaatgcgccgaaatgctcaaggctctaggctacatcactaagaagtagttgaatctcgttaaaatcgcaaaagccctccgcaaggagggctttcatcgtattaggcgcggaattcgcggctcagcggccagtaccgccgtacaccacggcttcgatctgatcggcatcgagaccgtatgcagtgtgcagcgccttgacggcgtcgttgagctgatcgagcggcacgagtgcggcgatacggatctcggaagtggagatcatcagcacgttgatgccctcatcgctcagggcctggaagaacttggcagccagaccggcgtgggtcttcatgccaacacccaccacggctaccttgccgacgttggtgttcacatcaaaggagtggtaacccagcacttcctgcttgtcgagcagcgtgttctgcacctgcttgacggccgattcgggcacggtgaaggagatgtctgcagtgccaacggatgcgccggcctgcacgatcatgtccacgttcacgtcggcggtggccagctcggtgaacaccttggctgccatacccggctcgttcggcacgccacgcacggtggccagcgcctcggaacgatcgtgggcaatgccggaaatcaccggtgcctcggggcccaggtcagggaacaggtcgcccatggatttcgcttcttcttcagtcatgtcttgccttgtcttggttgaaattacttacgattattgttcgctgtagccgcgctcagtcgaggttcggcagcgtgcgcgggtcaatgccgtcaggcacaaccagcgtgccggggcgacgggagaacgaagagcgcacatgcagcggcatgttgaaacgctgagcgtactctacgcagcgcagtgccagcaccttggagccgcaggaggccatttccagaatggcttcgtagccgatggaaggaatacggcgggcggaaggcacgatgcgcggatcggcggtaaagatgccgtccacgtcggtgtaaatctcgcagatgtcggcaccaagggccacagcgagtgccacggcggacgtgtccgaaccaccgcggccgagcgtggtggcgtcacccttggcgttgatgccctggaagccggcaacgatggcgatgtctcccaatgagagcgcgttcttcacgcggtccggtctcacggccttgatgtgggccgcgccgtaacgggtgtcggtgaagaagccggcctgctgaccggtgaaggagtgggcgcggctgccttcggcgtgaatggccatggccagcaggctcatggaaattcgctcgcctgcagtcatcagcatatccatctcgcgctcgggcgggttggagtcgatgctcagcgcctgatcgataaggtcatcggtggtatcgcccatggcggagaccaccacggccaccttattgcccttcttctccgtctccacaacgcgcttggccacacgtttgatcgaatcggtatcggcgaccgacgagccgccgtacttctgcacgatgagagccactgctgtcctttgttcttctcttagggatttgtttggtcgatattctacgcaaacgcaacgattataagggctgtcgcgttcaccccgcgaccccgcgccggcatgcggacacgggtatggcctacgttgttcagcaaatattcaagttttcaccggtggttctttgagacagccgcatccatcctttgagattcgagcggttaactatcaattaccggca

SEQ ID NO: 3015 - DNA, 2691 bp, Unknown
  R19_24m  MAG No. k141_15839
aaggatagggacggcatgggcttcggcacgcttcgcagacccggcgaaatggccttcgtcctcatcgtcgaaccatacggaacgtccttgcctgaaacgatagggcatcaccgcatcggcggcggacaaactgtccgttccgccaaacgttacggctctactgccggcagcgcctgtgcccccaagcattccacctgcctcgccagagataccgcctataccgctgctcttgccggcaaagaggcccctgtcctcattagtgccatctgtgtcatctgcgccatactgatcatcgtcgtaatcggcaccttcgtcgcctccccttttccaaggattgcgacggcgcaacgcatggccccaggaaacgccggaatcatcatcctcataaggcaggaggtcatcgtcatccgcattatcgggaacatggccaaatacaccataccctttgctcatgggcgagcctcctttccagcgaatgcatttcagtccaacacttctatcctagacgaggcgcgcggtagccttaatgtatggatgcagacaagccggcgcaacgcaaatcctatgcagggaacaccaccctcgaaatcttcgaggtgctgtggcgtcacagctactttggacatggcctgaccgtgcggcaaatactcgatgaacttgcccgtaaacaccagctggaagatccaagcgagctgccgaccgagaaaaccatacgaaatcagctcaaaaagcttaccgccacggaatttctcggcagacatatcgggcatctcaccgaaagcgaccttgccggcatcgaatgcaagaatccacaacccggctggtatcttgacgcattcctatccaccgccgaaatgcgactgctactcgacagcctcaccttgtctcgcatcagcctcgacaccatggacgatctcatcggtaaaatccgcgaactcgcaggtgccgctgggcaagcagtaggttaccttgagcacgtggccacctacacgcatatcaacggcgagttcctatccaccatcgaccaactgaatcaggccattgaagaaggccacggcgtaaccttccaataccgtgattacggcccggacggcaccctgataccgcataaaagccgtacgggcgcaggtcgaattacctacaccgccgacccttaccagatggtgtacaagaacggacggtattacctcatctgccatctacatggcgaggataatctccgcattttcgtggtcaaccgaatcgccaacgtcagcgccaaaggcaggaacggcacagttccactggaaaaaccagcgccggctgattttgacgcagtgaacttcatgcgtcaccgcccgtatcccgtagccgatgccccgattcgcatccgcatggccgtacgagacgaatccatgctcaacaatgtgttcgaatggttcgacgaccctcagatcaaacattcgccggacggcacacagttcgaagtcatcgtcgatgctcccgaacgcgccgtgttctggtgggcattgcagtattcctgggatggccgcgtagtgattcttgagcccgattcgctcaagcgcaaactctatgatgccgggcgtcgcatggccacagcctatgctcccgaatgatgcagcatcacatcgcacacctccttgccgagttgttcaccagcgaatttcaccggagaacctatcatcccatcgccaatcacgttcggtaattttttaccgaacaactcgatttcaagccattccacgaactatggcccccgcctagccgtacttgacgctaaggtggaaccatcacatgccgcgatgcacatgcaacgcaaacgcaacgatatgtaaggagcaactatgagcgaagagcgtaccgcatggggatggggtctggccagcgtagacgccgccggcaccaccctagacgtctggtaccccgaactgaatctcggtgaggcaccggtcgaggccgatcgtccaaaccacaatttcggcactctggctcacgatgaagccgacgcccgtggcatccgccgcgtgccggtattcgtcgtcagccagttggacgagccgatcagcaacgccgcggacgcttacctgaaactccatctgatgagcatgcgcatggccaagccgaacacgctgaaccttgacggcatcttcgcccaactcgccaatgtggtgtggaccaactacggtcctttcgccgttgaggacttcacactacgcaaggccgatgtcgaacgcgcctccaccgaagccgctctcgctttcgctgctcaggccggactgcctgccgcagctcctgccaccaccgtcaacgtgttcggtgtggataaattcccgcgcatgatcgattacgtagtgcccaccggcgtgcgtatcggcgacgccgaccgtgtgcgcctcggtgcttacctatcttccggcaccaccgtgatgcacgccggattcgtgaacttcaatgccggcacgctcggcgtctccatggtcgaaggccgcgtttcgcaaggtgtggtcgtgggcgacggttccgatatcggcggcggtgcctccatcatgggcaccctctccggcggcggcaagctgcgcaactccatcggcgagcactcgctgctcggcgccaacgccggtatcggcatctccctcggcgataactgcaccgtcgaagccggtctgtacatcaccgccggcaccaagatca

SEQ ID NO: 3016 - DNA, 4500 bp, Unknown
  R19_24m  MAG No. k141_15933
atccgtgcaggtggcctcgatatccgtcaggttcacgtcggcgcgtacgtgcacgcccagcgggtaggcgatgcggtgcatcatttcacgcacgcggaaggagccggtgccggctcccaggtccagcatgccgacccgtacaatcacgctggctttggcggcgataccggcgtccaccaccggtttttcccaatcgcgcgcaatatcttccatgtccagcggaatggagtgggtgtggaatttacgtacagccgttgcgcctttcgcttcgggcgcactttttttcttctgttcgctcacatccttcattactactccctgccttccccgccggcaatcgtaaggtgctcaaatcttccgcgaatcggacagtgtctcatatgccgtccgatattcggtctctataggtggacaacttggagcactatatggacttcgtaacgcaaatagcgatttcgcggggatacactattgcccacacaacaaccacgttgaatatgggctgtgggctcgcaacgactggcctcaacaactgcggaggagccgcagacgaccggtagaccgagcaacctgttattcggcaaaggaggttatatggcaacacctgaagaacagatcactcccgctgacgccgccatcgtcactaccgggaccggccgaaagggcccggaggagcatgatcttcccgaaagcctgaagtacgacatggatctgtgtcttgagatcctgcgtaacgtcctgggcgaatacaaccccgaactgctgtctacgttcgacaccgtgcgtcattacgcggtggaggccagcgccgagcatttcgccgagctgaaggatccgaaccccgaccaggatggcctgaaggaggccgtgaacgtcatcgacaacatgacgttgcacgacgcccagctgctggcccgcgcattcgccacgtatttccatctggcaaacctgtccgaggagaactaccgtgtttccgtgctccacgagcgcgagaacaacgtgtccgttgaccaggcggtcgacccgatcaacgagctcaccgtcgcctaccaccagctcatcaatgagactggcccggccaaggccaaggaactgctcaaccagctcgaattccaccccgtcttcacggcgcaccccactgaggcccgtcgtaaggccgtggaaggcaagatccgccgcgtttccgaattgcttgaggagtacaagcgcctcggcggctcggataagaaggaatgcctgcgccgtctctacaacgagatcgacgccctgttccgcacttctccgatcgcgctgaagaagccgaccccggttgaggaagcggacacgattctcgacatcttcgacaacacgctgttcaacaccatccccaaggtttaccgtcgcttcgacgactgggtcctgggcgataaggccggtctcgtcgagcccgcttgccccgcgttcttccacccgggcagctggatcggctccgaccgcgacggtaacccgaacgtcaccgccaaggtgagccgcgccgtggcccgcaagttctccgatcacgtgatcgccgcccttgagcaagccacccgcaccgtgggccgcaacctcacgatggaagccgagaccacgccgccaagcgccgagctcaagagcctctggagccaccagaaggaaatgagcgagcgcctgaccgacaaggccgccctgatctccaccaaggagatgcaccgcgcggtcatgctggtgatggccgatcgtctgcactacaccatcgagcgcgatgccgacctcatgtaccactcctgcgacgacttcctcgccgacctcaaggtggtccagcgttcgctggccgccgccggcgccaagcgttccgcttacggcccgctgcaggatctgatctggcagaccgagaccttcggcttccacatggtggagatggagttccgtcagcactccgtggtgcacgcccgcgcccttgcggatatccgcgagcacggcctgcacggcgagcgcggcgaactgcagccgatgacgcacgaggtgctcgacaccttccgcgccctcggtgccatccagaagcgcaacggcctcaaggccgcccgccgctacatcatctccttcaccaagagcgcccagaacatcaaggatgtctacgagctcaaccgcttggccttctcccacccggaggacgtgcccaccatcgacgtgatcccgctgttcgagcagcttgaggatctgcagaactcggtggacgtgctcgaggaaatgatcaagatccccgaggttcaggctcgtctgaaggccaccggcaacaagctcgaggtcatgctcggctactccgactcctcgaaggacgccggcccgacctccgccacgctggccctgcactccgctcaggagcgcatcgccaaatgggctgagtcgcacgacatcgacctgaccctgttccatggccgcggcggtgccgtcggtcgtggcggcggccccgccaaccgcgcggtgctcgcccagccggtcggttccgtcaagtgccgcttcaagctcaccgagcagggcgaggtcatcttcgcccgttacggcaacccggtgctggccatccgccacgtcgagtccgtggctgcggcgaccttgctgcagtccgcgccgagtgtggagaagcgcaacaccgagatgaccgagaggtacgccgacatggccgctcagctcgacgaggccgcgcacaaccgtttcctcgacctgttgaacaccgatggcttcgctccgtggttctcgatcgttacgccgctgaccgaaatcggcctgctgccgatcggctcccgcccggccaagcgtggcctcggcgccaagtcgctcgacgacctgcgcacgattccgtggatcttctcctgggctcaggcccgcatcaacctggccgcctggtacggtctcggcaccgcatgcgagaagttcggcgatctggagaccatgcgtcaggcttacgaggaatggccgctgttctccacgttcatcgacaacatcgagatgtccatcgccaagacggatgagcgcatcgccaggatgtaccttgccctcggcgaccgcgaggacctcaatgagaaggtgctcaacgagatggagctcacccgcaagtgggttctggccatcgtgggcgacaagtggccgctgcagcaccgtcacgtgctcggccaggccatccgcatccgctccccatacgtggacgcgctgtccgtcactcaggtgctggcgctcaggtcgctgcgcaagaaggtggacaaggaggagctctcgcaaagccagcaggcaggattcatctatctgatcctctgcaccgtttcaggtgttgctgccggcctgcagaacacgggctgatttccggccgaccgatcgacaaaagcgagcggggaggttccgtgccgataaacggcgcgggcctccccgctcgcgtcatacggccctagactggccggcgacggcgcacgccgggcgggcgcgcagagaacggacgcgcggaacgagcgacagactcggatgatcggaggggacatgggcaagccggcggatgggcgcgggagcaccgggtccacggacggcatcaaggcggggggcgacgccgggaacgaacgccacgcttgcaaagcgaatccggctacaaccgatggcattgggaagaaacacggcacagaagatatgtcagaaagtttttccggcgagaaatgtgctttggcaccgaaagcagataccaaattccttaaggcgagtagatgctatgtggttttgggcaaggccagacgtgtgctgtggtggctgggattactgctgctttcaccagcacttattttgtgggcggaatggggcaccaatggcgatgatgatactataatctgcagagttctaacgttctcttcctcttcgtgcatgaatttaactacggcaactgagtatgtacgtaggcttaccttagtattgattatgggggtagtctgctggattgcggcgcttgtcatctttggcgtgcgttcatatatgcgatctgtatatccggaacttcgtgatcattccccttccgcctcgcatgtccttgtgggaatcatatcgtttctcgtgctggtcatggtctttcctgtttttgtgataacgctactttccgctctaatgactctatgacgttttaccagaggcgcattgcgtggaatggctgaatcattccacgcagtgcgatcacaatcatgattgattaacggttcggattttcaagagattcagcataggataatgccaatataccagcctccgcttgactcgggagtcggtctgcatgtgacgcaatgagcagtgcttttttacttccggatacgttatcgaatattccaagatcgattccatcaacgagctttcgaaatgcgatgaccaggttgtccgcacttcccttgaaccgggactgatagaaccgtttaattcgattcgtctcgctttgcgcgaacatgtcccgcatagcggtggacaaagacctttcggaggaat

SEQ ID NO: 3017 - DNA, 38676 bp, Unknown
  R19_24m  MAG No. k141_16193
agcttgttaacgcgcttctcaatcttccacatctcatccggaccgaacttgtcggtatcagtcagcgcgctccatagcgaatgataacgatccaccaaacggttgccgatctcaatctcatcaacaccgctcggcagcagcgagccggacgaaagatccatcaattcgccgataatgttcgtacgagccaaatcaacatcgtattcgcgttggccttccgtcagattaatctgcagatcaccggtttccgcatcaaccaaaaatgcggagaacgcgtaggcatcacgcaggaacaacacattcgacagcgacacatcgccccaatagaagccggccaaatgcaaacgcaccatcagcacagccagtgcgtcgatcagtcgttccgcggtatcagggcgcagattacgcgcgaacagcgcacgatacggcagtgagaacttcaaatgcttggtaacaagaatcgcttccagcggctcaccctcacggctatgacggcccgtgaccacggcgatcggctgcacggtcggcagttccagcttctgcaggcgacgcagcagctcgtattctcgttccgccacattgcgcgtgatttccttcatggcgtacacttcgtcgcccacgtgtacgaaacgcaccacgtgcctggaaataccacgcggaagattggccagcaggtcttccggccaagtagccagcggcttttcccacggcagggtgaacatcttcggattcgagcttgcggcggtgattttcagcgcctgcggctccggagatgaggcggccggatcttcagccttcacggaagttgctttcagcacacggggatccatctgtggcaattcaagagattccataaatcaacaatttacctgttgacctacccgaagaagcaagtatggacgaatccgtttcacctgccgatatttcatccatcgatatttcattcatcgatatgcgatgatcaccattgaaattccaatatcgcatttcatttgagatcccaccattgcaatctcaataacgaaatctcactacaggaaaacaaatctcactattacagatacaacaaaagaagccccgcaccaacgcggggcttctccaacgagacggtaagagaggaagagtacgtctcgtttaatggttgacggaagttcgcgcttccgccaagtttttattcagccacccgccagccgatttccgcaaaggatattcccctgaagaaacagccaacggttggttactcggtatcagctcagttcagacgcagctcggtcgacggagcgaacaggtgcatcttggacgggtcgatcttgatcttgacggtatcgccgaccttcgggagagcacgcgggttcacgcggatcgtggtgagcttgttctggtcggacatcatggtggatgcctcagcagcggagccatcggtgatgatgttgccgtagatgtagccatcggagcccagatcctcaacgttcatgaccttgagggagaaggcattggcgtcatccggggcagccaaggaagcgtcttccggacggaagccgacaacgatctggctgttgtcttcagcggtgagcttgttgacagcctcggccggcagatccacggtgtcttcgccgatctttgccttgccgttgaccaccgggtgggtgttgatgttcatcgacggggagccgatgaagccagcgacgaagacgttggccggacgatcgtacagctcggtcggggcgccgacctgctgcaggacgccgagcttgatgacggcgatgcggtcgcccatggtcagagcttcggtctgatcgtgggtcacgtacagggtggtaacgcccagctggcgctgcagagcagcgatctgggtacgggtctgcacgcggagcttggcatcgaggttggacaggggctcatccatgaggaagaccttcggctcacggacgattgcacgacccatagccacacgctgacgctggccaccggacagagccttcggcttacgatcaaggtactcggtcaggtcgaggatctcagcggccttctcgacgcgcttgcgaatctcttccttcggggtgccggcgatcttcagagcgaagcccatgttgtcagccacggtcatgtgcgggtacagagcgtagttctggaacaccattgcgatgtcgcggtccttcggctgcatcgtggtgacgtccttgccaccgatgaggatgcggcccttgttgacctcttcaaggccagcgagcatacgcagagtagtggacttgccgcagccagacgggccaaccagcaccaggaactcgccgtccttgatgtccatattcaaatcatccaccgacggcttatcgttgcccgggtagatacgagtaacatggtcgaatacgacttctgccatgatttgtcatcctttcagaggcaggtacgtgcctcacgatccgttgtaaagggatttcttccggtgcctcgccttgcggcttacaacttcgacaaagccacaattcaaagcgttaatttatttctttggtttggcgaaggttctcttcgttgagccacgttccatgatacatacaacgctaaaactgtcaatgcgtgtcgcgagtcgcgctgttcgcctccgccggcaaaaaggggttaacagcgtagtaaatatcacgcatttatcgccatcatgcaagacaatggtgcgaagcgaaagacagaacagggaggttgcaatgcgcaatattcgaatcggcgtggtcgaggacgatcccgcaagctgccagctggtgctcgactatctcaatcgatatcaacaggaaaatggcgagcaatttaccgtttccgtattcgacgacggtgcgcgaatcgtagaaaaatatacccccgtttacgatattttactgctcgacatcgagatgagcgaaatggacggcatggccgccgcgagacgcattcgcgagcgcgatgacaaagtcgtgatcgtgttcatcaccgctgcaccgcagtatgcgatcagcgggtatgaggtgcgtgcgttgtcgtacttgcttaaacctctaccgtggttcgcgttttcgcaggagctcaaaaagtcgatcgacatggtgcgacgcaatggcgatgattccatgctcatcgaaaccggcaacgggcagatgcgcctgaatcttgccgacattctgtatcttgaatcgattcggcacaccatcgtcattcacacgctggaaggcaaactgtcgatcaacgggacgctcaaagacatggaagcgaaactcaccgaccatcatttcttccgctcgaattcctgctatctggtgaacctcaagcatgtgacgggcgttgccgaccaggattgcgtgatgtcgaacagtgagcagctgcgcgtgagccgcccacgcaagaaggcgttcatggccgcactaactgactatatgggaggtggcaggtgatcggcgcagtattgccgaatatgctggccggattggcaaacgcacctttcgtgtcttctgctgcggtaaccgtgctttcggtgccgtcgatgacgccgatcactaacgcgctacccgacattccccgttcatatacggcgatctgcgaatgggccgcctgcatggtgtatatcgcggtgctgtatcggcgcgttccgctccagcggtcgatcattgtcagcgcggccggactgctgctgctgactgcagtgcagtattttgacggcagtatgccgatctggttttggattatcggtatgctgctcgccttcgcctgcatgtatgcgacgattctgcttggcgcgggcaccggcaagcgcgaaggcctgtatattacggcacgcgcgttcgtgttggcggaattggtagcgtcgctgcattggcagatcgttacgtttattggtgtgcgcgatggtttcgccgattacgattggcgtgcgatcgtgctgctggtcgttacgtatgcattgtgctttagtttggcttggctggttgaacgcggcaatttcagccagaccgcgccgactttgccgaccgcttccgccgcgattgcgacgatggccatcatgatcgtcacgttcgccatgagcaacttgagtttcgtatcgacgaacacgccgttttccggttcggtcggccaggagattttctacattcgcacgctggttgatttctgcggtttcgcgattctgtacgcacagcaggagcaggtgcgccgcatcgaagcgaatacggaactcgcatcgatcaacgcgcaactggaaagccagcatcaggaatatctgcaatcgaaggaaaatatcgaatcgttgggccggattgcacacgatctaaaacatcagatcaccgcattgcgtgccgaagtcgatccgaagcatgccgcagccggcttcgagcaattggagcaatccgtgcagcgctacagcgcgcagcaacatacgggaaatcctgtgcttgacgttattctgactacgaaagagcgcacgtgcgccgatcgcggaatcacgttcaccgcggtcgcggacggatcgctgttaagcggcatgtcgtcgatggatatcgcgtcgctgttcggcaacgcgctcgacaatgcgatcgaagcgacgtcgaaactgccaaaacgtgaacaacgactaatcaaacttgcgttatacgagcaaaatcactttatcgtcatccgtgttgaaaattattacgattcccgactgaagaaagatgcggaaggcaatttgcgcaccaccaagcgcgacgaccaacaccagcacggattcggcgtaaagtcaattcgtcatatcgcacaacagtatggcggcgaagtgacaatccgcaccgaggaccactggttcgtgctgaccgcgctcattccgcgaaaaaccggccttatggccatatgaaaaccgcgcctgattcatgcggggacccgcgaggccacgcacgactcagacgctgtgtttgggtgagatttgagcggcttggacgactggaagacgactccactaattctcagggttttgcggcgcggtgtctccacccgcttcaccttcattatcgggcaatcagcagcggccacccgtatgccaccccctagtttaccgtctaatgcatccttgcatgcgcattcttctcaattagtttcttttttcgtgcttttcgatagatgtacagcggcaagcggtccatctaaacggcttgcgacgaacgcgctgaccgcaaccgcgaagccaatgggcacaaacagattaataggagcatccgcaagttccatcaccaaacaaatcgccataagcggagcctgctgggacgcagccaacagcgcgcacgcacccagcagagcatacatgccaatcgaattcgtgtggaacacctgcatccacagaatgccgagcaacgcaccccccgaagcaccgagcgcaatacccggctgcaacacaccgccggaagcgccggaacggatcgtcaacagtgtgacaatcgccttcgcaaggaatgaaaccaacaaaatcggcagcacagccaaatcaacgtcggacgagaaactcaattgcgcggtggcgcgaccattgcccataacctgcggcacccaaatcgccaccacaccggttatcaagccagcgagcggcagcatccacaaaatacccacgcccgacggcttggatttctcagcccactgcgagccgcgacggaacagtgcgccggcagcgccgagaatcatgccggccaccagtgcgaacgccatgtaatcgggggtaaacaaaccgtcagtttcaccgatcaaatagaacgtgtgcgtacccttgaccagcgacgccacccacgaagccagcgcggaacaggcgaatgcgagcgccaccgtttcgagggttatgtcggcgagcagaatctcgaccgcgaaaaacgtgcccgcaagcggcgcgttatacacgcccgcaaggccggccgcagccgtgatcgccaccagcatgcgagtgtctttcgtatcaagatgcacccaacgcgcgaaccgttgaccgaacatcgcacccaactcgcgcggcgccacttctcgaccgatcgacatgcccgtaccgacaatgaaaatctgcagcagcacatgcatgacggtctgccaaatcggcataatatcgccatttaccgcctttttaacggacggcactttcgtactgcgcgtacgcaacagccaccaaatcacggccgcgatggccgcacccgcggtcacggaaatcagtcgacgaatcacaggaacgttgaacgggccggattcctgcgaattctcaacatagccgagtgcaagatgctcgacgccgtacagcatcaacgtcagcagaccagcggccgcaccaatggccactcccacaatcaccaccgccgcaatcaacgccggaattctgccaatctttggctgcgttccgtgagaattctgcgactcctgcgattcccgtattttttgcgattcctgcgattcccgcatctgccgtactccccacacaccgtctccttcgttcaattcgttcccccaattgtccacctgccgcagcattcgtttgttacgccccgagcgtggcaatcggcagcaccagaatgccatcatcacgacggtatgcaatatcaccacgcccgacaataaacgccatgaattcaggctcacgaacttgagatagaggatttccgcacactttttctttgaaagcatgtagtttgtccacatttttctccgtgactttcaagtcgctcagcttaatctccactgcagcccagcgaccatccaccaattcaagaatcacatcaacttcaagacctttttcatcccgataatatgcgattcgattcgcaccacccatcgactcgagatatacgcgcaaatcacgaatcaccaatgtttcaaacaaatctcccagcgtttgcgtgtcacgcgcaaggacagccggagtcgcccccagtaacgcgctcggcagcgatggatccacgaaataacgcttcggcttcgtgcgaactcgagattttgcacgaagagaaggttcccatccttctaaatcgtcaatcagatagagacttttcagctcatccatatatcgtttcagcgtcggagcgctgatgctgacgccttcatcaccgtatgacatgtctttcatcagcgtctcgtaggtaggcgcctgagccacattcatggcaagtgccttcatgagaacccgcattatttccgggttaagaccaagcttaggaatattgacgtccagtatgcttcgtacatattcagccgaagtctccagagcgaactcgtcttcaacatcaaggtttgacggccatccacctcggcaacaccaccgagccacatccataatgcccgtcttgtttctggaaggttcaaactcgccttcaaaaagtttgccgagacttacgctccctgttgattcaccggattcagccaagctcatcggacgcatatgaagtctcgcaatgcgaccggttccgctatggtgtattttctcagtttccttaggttggctggaacctgtaaggattagctgccctttacgattggcgttatcgtcaacatgccggcggacagcatcccacacagccggaacttcctgccactcgtccacgagatgcggctcttcacccatgagtaccaaattcggatcgttagacgcggcgtcgtaggtagcggaatcatcgagacgatccacactggatgcatgcgtcaaagccgtccacgttttgccacaccattttggacctacaatctcaacggcaccaaaagcgcgcagcagtttttccagccgccggtctgcaacgcgaggacgatattccgccatttttaaatcactcatcattccgcactttcaagtttacgccaatctcattttcgattttacgctgttttgactttcgattttacgccaatctcactttcgattttacgccgacaacactgctgacgattacattttcgatattgagaaatcacgagaaagcagcaaaaggtcataagaaaacccgcccgggaaaaggaggaagaccgggcgggttgaggagaggaagaaagggaagtcagctatgaagggttacttagtggcctccttggagtccttgctcttcggcataacccagaacttgagcagcgggtagctcacgatcacggcgagcagggtgttgaccacggaagcgatggtgccggcgatgccagcgcccatgccccagccctggcacagaccggtcacgtagcccggcagcacgaggttcacaaccacgatgatcacggcgaggatcacatacttccaagcggcgtccttgaagctggagtcagacttgaacacccacttcatctgcacgaagaagttcaccacctgagcgagcacctcggcaagcaggaaggtgaggaagccgcccagaccgtttccctgggtgtcgtagttgaagatcaagaagtggaatggctgagtcaggcccatgccgctgatgaagatggcagtgccgatccacgtcaccacaaaacgggtaatggtggagatgttcgacagcaggttgaacaggatgaattcccagatgttcgggtgatccttgatccactggcggatcggaccgaccttcctggccggctgcgtcgcgttgttatcagtcattgttcagctcccttgcagtgcgcatgtttgcggattggttgcggaagaagccagcgataacgccgcccaatccgcggaaggtgtggccgttggcgactttgacgatggcgtcgaccatcgcggaatcgaccatgccttgggtcatcttgctcatggctcgcggaggcatgttcaggatgaagagggtattaaggtccggagcaccggttttctggcggatcttggcctcctgcttggtgagcgtcttggcgacggtacgcgccactaggcctttggaatccacccaagacataatcggatcgttcacatcgaacgtcaccggcttgcccggagccacaacctcatgaccgaacagaatggccatttcagcatcggtcacttccttgacgtgaccactgaggtaatgtccgagcgcaacatctgcggcaacgggatcgatatcgccggcaacagtgagcggaatcgaaagcggcagatgctcgacattgtcgcccaccatcagcgtccactcgccggattcagtcttccattcgttgctggcaacgtcgaaatgacggaaggtataacgatcgaaatcaatgtgcacgctcttgctttcatgcgcggcaagcgaaatcttggcgaagcccttgagttcgcgatcggggcgcagcacgccaccctgcgggccgcgcacatacagctgtacaacggtcgaaccggcaacgtcggaatcgttgctgaccatcacgtcaatgcccttttcgccagcggtcgcggcgctgtaggcgaacttggaatagctcaggccatagccaaacgggaatcgcaccggcacaccggcggtttcgtaatagcggtagccaacgaacgggccttcgcggtagatcgcatcgcgaccgattgccggataccaaccggagctcgggcaatcctcgtaacgtacaggccaggtttcagccaagtggccggacggattgacctcgccggtcagcgcacgtacggttgcggaagcaccggcctgaccggacaggcccacgtaaagcactgcggcaacatcatcaatccacggcagttccaccggagaaccggcaacaagcacgatcacaatcggcttgccagtacccttcaacgcctcgaccaaatcgttctgcacctgcggaatcgccatggtggaacggtcaaggccttcggattcgctacgctcatcaagaccgacgaccgcaagcaccacatccacatcattcttaccggccagtgcgacggcgtcttccacaagcacgcaatcagccttgccctgacgatcgtatccccgctcgtaaccggcaagcaccaggccttcagcgttcttgacttcctcaagaatgttctcttccttggtggcgttcaccttggaggagccggatccctggtaacgtgcggttgccgccatatcgccaaccacggccacgcgagtaccagccttgaacggcaaagttgcgttatcgttcttcaacagcacgctggagctttccgccaccttgcgtgccacctcgtgatgggccgctgcgacttcgtccttgagcagatcgttgcgtccaacgccgaccagcttggtcgctgcggcgatctttgcgacttctgcggcacgagcattgaggtcggcttcagacaaggcgccagccttgaccgcgccttccagctcacgcacggaagtaaaacccggagacggcatttccaaagaaccgcctgccttgactgctgcaaccgcggagttggatccgccccaatcggagacgaccatgccgtcgaagccccattcgtcgcgcagaatctcctgcagcaaatgcttgttttcgtgcgcgtagacgccgttaatctcgttgtaggaggtcatgatggtcagcggcttggcctcacgtactgcgatttcaaaaccggtcaaatacagttcacgcatggtgcgttcgtcgaccacggagttgctcgcctgtcgacgcagctcctggctgttgaccgcgaaatgcttcgggcatgcggagatgccgttgctctgaatgccgcgaatcaggcccgctgccatacgcccggcgacaataggatcttcggagtagtactcgaagttacgtccgcacagcggattgcgcttgatgttcaagcccgggccgagcagcacgttcacgtcaagatcgtgcgcttcgttgccaagggcctcgcccatttcttcagcgagcgccggatcccaagaattagccacggttcctgcggtcgggaagcaggtggccggcttggatgcgccaatgccgagatggtcaccttcgccgagctggcggcgcacaccgtgggggccgtcactcatcacgaagctggggatgtctgcgcggtcgttgcctcgcgaatcccattcggatccaccggaaagcattgctgccttttcaacgaccgaaagttcttcgagttccattggttctcccttgcactaagcacgtcgcaaacccgcttcgtcaggcctgtcttgcccggctccactgtggtttttcttgcgattttcccgctgccgcaccacgccgcatcgtgccgtgctgcacgcaggttttcgccgctagtctgattgaaccagctttcgccacaccaccactgctgtattacacaacctgtcgttttgcccgcacaatcggatatttctaaactgatttcggaatcaaaggaactcacatgacagatacgtttttaccgctccgccgcgctttcgcatgcgttccatacacaccacacggcgtaggaaatgagcggacatatggtggcggaaataatcacgtcggtcggatagtgcaagccgagcagcaatcgcgaacaggcaaccgccacgacaagcgcgacagcgccaatgatcgccctgcggagaaacacccgtcttccgtttgcacgcccgccatcttctccgtcggggaagcatttgtgcgcgaaattacgtacggtaagaatcatcatgaccgatacgatcaccgcagccgccgtgtggccactcggaaaacttggatcgcccggcaacaggccactgccgacggacgtgattggacgggggcgttcgaccagccatttgacgccggtcacgtacagtatcggcgccgccgacacgacgacatcgcggatgacgacgcgcctgctgccggtaatacgcaaatcgacagcggcaagcgcaacgacgattgcgatgcagcctaccgttgaaaacaggtacgcaagtaccgtggagcagtcgcgcaacccttctggcagcgccgctaaagcctgcaaaatattggtttcacgcattgttgcgattgccgaattgcgcaatgcgacgccaatcataggcacaatgccgcacaatatggcggttgcgattaccacagccgccgctctcgcgatacttccgttcttcatatgcatgattccagttaagcacagttcaccgtgccgttgccgtgtgttcacatccggagtatccccgaaaatcggcggattatccttcaggatgcttccacggcttccctgacacgcgcgctgcaaacggccgtgcaacgcaaatatggcatacccacacgggaaataccgcgaacgatgcgagaatcggaattggcgtttaagaaggaaagaaggaaatatgaccgaaccgatcgcaatgaccatacgccatatgaaaatcgaggattatccgctggtatacgggctgtggacacgatgcacaggtttcactatgagggatacagacgattgcaaggatgcgataaagacgtttctcgaacgcaatcccgacacctgtttcgcagccgaggacgatggcggaaggatcattggcgcgattcttgccggccacgacggaagacggtcgcgcatctaccacacggcggttgaccccgacgcgcgcggtaggggcattggctcgattttggtgggccgcgtggttgaaacgcttcgtgcgatcggactgccgaaagtcgctgtcggagtgcccgcagacaacgatgccggcaacgatttctgggaacgtcaaggctttgcagtccgtgacgatttggtttatcgagaactgccgttgtaataacgaaccatccacgatgccgtgcacgtcgcctcagcccacgttgttcgcggacagcaagtagaagccgcagcatgccgccccgcccatggacacgtaggccacggcggcagtgccgcggcccaacgcgttcatcgcgtggcgcagcagccacgcgtcaagagggcccctgccgcgatggaagtccgagaggccatcgatggtgaatcgctattcggacagaagacgcggtctgtgcgagcaagctatgccttggctagcttcttatgtctgagggtgtaaacggcatcagcggaatcggcgacacgcttggaatgcgtcaccacaatgacgcatttaccgagttgatgagcggcctgccgcaaaagatcaatcacctcatcagtcatttccggatccaggctgccagtcggttcatccgccagaatcgcgcggccgggcgccactagggcgcggccgaccgccactcgctgacgttgtccgcccgacaggtgcatgatgttgcgcttcgattcctcacggctcagtcccaaatcctcgaggatcttcatatcggccttgggattgaccaggcgcagattctcttcgggagtgagatagtcgatcagattatggtcctggaacaccaaggacacgtgctcgcgacggtgctttgaataacccgtcgtagctatatcctcgccctcgaaacggaccactccatcagagggggcatccagaccggccagcagggacaacaaagtgctctttcccgctcccgatgggccggttatcgcatacatctttccggattcgaaatctgcgttcacgtccgaaagagcacggatctttgccgcgccatatgagtaattgacatggtccaattgcagacagatagtcatgattaatatctcctaacgcatagaggaaagaatggatttcggggatttggctagcactgcggcgcacgacacggcgagcgcgatcgcgatgaccgcgcatccgagcagcaggatgagcagcgtctgttctggcggcagagcctccacctgcaatgattcaagaggcgcgactcccgaatcgtgcagcaggagcgaggacacgtatccagacaatagggagcccgtgcccagcgagcacagggcggcgactacagccatgagaccggtttcgattgcgaactgggcgataatctgcatcttgccgatgccgagagccagaagggtgcctatctcatggatacgtgagcgaatccagaagacaagcgccatgcccagtaccaacacatcagccaagcaaacggacagcagcaccatacggaccagatcgcgcaccgtttccaccgattgcagcacgccggaaagccgcgccgagtcatcggtgacgtcatacttgcttccagcgattttttttgcttgggccactgcagtggagagagcctgcggattatccgagaggcaccggatcgtgccgacccgttcctctccagtcagcgcggaaaccacttgggcacccgcatagataagattctccgatgcgtccgatggcatagggctctgtgcctgcacattgccagagaagattccggccacgcgaacggtggaatcgcggtcttcctgactgagccggagtgttgatcccaccgatagcccattctcacgtgcgaaatcccggtgaatcagtacgttccggccgttacctgaaatgtggtgtccttgttccaaccggtacagaccgctttggaactcttcggacaacgaggagtcagtggtgcccagcacgctgacctgcgtggatagaccggaatccagccgaggaccatgttcggggacaaccggatgcgctccatccacccctgccaaggtcttacgctcgtaaacggtttttcctacaccggggatgcgcgagaaccggctcgcttcctttagacttgcaggattctcgcctgtgtcgacggtaaaacctattcccatgcttctgccgatatcgtcggacattttctgaagtgccgttgacactccgacctgagccacaagactggtgaaaaccatcagcatcagcagtccgatgattccgctgcgtaccggtttacgcacgattgccagcgtggcacgattccacacgttcatgcccgtcatcgcagctccgacaggcttcgcggcgacttgcgcagcatcggtatgcacgatatggcgacgcataccagcatcaccgccagcaggccgagcgacacatacagtacggcagtcgtgtcgatcgataccgtgagcgaatccaaggtacgaaccgacatattggattcgagatcgccgccaacctgtcccatgctgctcagctccttcgccgcggaggcgttcacggaacggagggccgaggtgccaagccattgggccactcctcgtgcgcacaaccatccgaagaccagggacggcaggccgatcagaatcatttcggttagatattgggcgatcagggatggcttgccgatgccgagggacaccagtacgcccatctcctgacgtcggtcgttcatccacagtaagagcatgagactgagaactatcacggccgaaatggtcacgccgatcaaagcgctgagcatcatggaacgcacacctcgggcggcattcagcatgctcgacgtatattggtcattgcgcgtgatctggtagttgttccaatccactggaagcttcttcgccgcttccatggttttctccacatcaacacccttgtccagaacgaaagtggcatcctgatatatttccttgccggccttgtactggtacagagtacttgtagtgtccaaatcggtgtacacagtgttggaggtgagttccgcgcggctggctaccttcctgtcgctgtctcctttgaatattccaacgatggtggttttgacggttgccgtcgaatgcgactcattgtcggcatcatatggattggctttaagtgtgagggtatcgccgactttaagaccattggctttggcgagatcctcatggatcatcgacatatgcttatcggatgccttgagatgacgtccttcgaccatgccgagcgtgtgcgacgtgaacacattgagttttgacgaatcgtttgtgcccatgacgttggccgcattgccgaactgctgttctttctccgcatcataatcatcgccgccagggaccttcaccacgctggctcccacgagatcggcggtggcgttctgcctgaccatgtacgagtcaaccccaggcagtttcgagattcgttgcacatcagcgggacgaaccattccgcctccgcgaggtgtcagcatgctgccttgcaggttactggccagcacgaatccgccgaccgcctgtttctcaatctgtccggcctcatgttgcgctgcccgagaaactgcggttgcggacagcatactcgccgttatgatggtcagcacaatgaacagcaccgcggtgcgtactcgttttctgagcacatagcgcgccgctcgtgagatgaatgtcattaataccccctgtaaagctgggactttctcatccgagacaatgaaatctaattcgattcttcgattggtcattcgctaaaatacatggttcacctcggaacatggcaagatatgccttgagcgaaaaagcgaaacaacattggttgcattatactccgggacatcgttcgttttgttcatttgacaaactttgaacggctataaaacagtgcatataccaatggaggccccaatcgaaattggggcctccatcagagagaaaggaaggatgtcaagtattggttatttattcggtcagcttggccttctcgttgacggcttcaaccgtctcgaccgtcttggcttcctcatcggagacctcaccggccgcgagcttggcttcgagctgctcgacgatttcggcgtgcatcttctcgttgatcttcaccttgaaggtgaacaccagcaggctgagcacaatcagaatgagcggcacatagaaggcgcagacttcgaaggtgtggatgttcgcagaggtcatatcggctgcagtggcgttgccggtcatacctgccgcaacggcgatgaagccggtgatgccgttcgacagggcgccaccgatcttgtcgagcatcgggcggacggacagggtgacggcctcgttacgcttgccgttcttcagctggccgtattcgatggagtcggtcagggagaggatggcggtcatctggatgagcgtgcccggtatgtagaagagcaccagtgcgatgaacaccacgacgatgttggtggagaaaagacccagcagaacgtaagcgacaatcatggagatcatgccactgatgtacaggtagcggcgtgggatgcgcttgttcagaatcgggtacagcggagccatgatgaggccggccaccagtgcgatgacaccggtcgcggagtaggcggcctggttgtcgagcacgaacttgaacaggaagaggagcacgccggtagtggccacgttggcgatggcgtacagcaggtaggacagggcgacccacagcagctggtcgttctggaacagtgccttgaacgcctcgagcgggttgccgttcttctgggccttggaacgcagggcgctggtgctttccttagtgccgaaggcaacggtccaagcagtgaggatgccgagcagcataacgatgatgccgaatgcggtccagccgctctggctttcggcattcttgccggtgaacatgtagctgaagtaggtgacaatcgggatgacgaagatagtgatgccgttgtagccgatggaaccggtgaaggatcccagagaggtgtaggtggaacgctcatgggagtcggaggacagcgccggaatcatgccccagtaggagatatcacgcagggagtagaacacgtcgagcacgacgaaggtgatgacgaacagcacgatgaacagcgtggtgttgacattcaccagaccgaacatgccgctgaagacgatggcgagcagcacggccgagacggcaccgccgatgaactgccaaggacggaagcgtccccacttggtggtggtgttgtcgacgatgttacccagcaacgggtcgatgaagatttctgcgatacggataatcaccacaaggctggtgatgacgccgataagcttggccgccaacgccttgtcgacgccggagaacaggcagctagtcacgtacacaacaaagtacgtgctcatagcgttgtagaaggcagcctgacccaagttaccgcatgcgtaggcaatgcgctgaccgagctttcccttgcggactccaccgtccgcggctgttgcgttgctcatttttttcttctcctctaagatagttggagccgagatcacccattgatcttgtattgcaactatacgccgttttatgaacagaagtaaaaaacattagtaatcaaggcttttgccggcgtgttgcaacagttcccataatgcaaaacctatccgtcaccgacttaaacacgtttaacgggagtgcttgaaaaacagagggaaccgtggtggtaaatacgatttgctttttcggtaaaaaacatttatccttgctagtaaaggaagtttagcttccgcatcattcacaacgaagtaatgaaagaaagcagggaaacatgacaaatcgtgttgagcatgcatccgagacgtggctgaccgacgcgactgtgttcgaggtcaaccgcacgccggcccattccaaccacaagtgtttcacgcatgatccgcagagtggtgagtactccgatctcacgcaaagccttgacggagaatggcgcgtcgagatcgtacaggcttccgacatcgacttcaacgaagagccattcgttgccgaaaacttcgatgattccgctttctaccgcacccaggttccgggccatctgcagatggcaggcctgctgaagaacaagtacgtgaatatccagtatccgtgggacggccacgagaatccgctggagccgaatgttccggaaaacaatcacgtggcgctctaccgcaagaagttcgttgtgtccaagagtcttgcggacaccaaggagtccggaggaagcgtctccatcgtcttccatggaatggcaaccgcaatctacgtgtgggtcaacggcctgttcgcaggttacggcgaggacggattcactcccaacgagtttgacatcaccgatctgctgcatgacggagagaacgttgtggcggtcgcttgctacgagtattccagcgcatcctggcttgaagaccaggacttctggcgtctgcacggactgttccgctccgtcgaactgacggcgcagccccacgtccatgtcgagaacatgcagctcgaagccgattgggacgccgagtccggcaccgcctctcttgacgccgcattgtccgtgcgcaacgcctccgatgccgctaccatctcggccacgttgaaggattccgaaggcaacgtggtatgggaggcctcgaccaacgccgacgccaacaccacgttcgcaagcggttccttgcagggcctcgagccgtggagcgccgaaagcccatctctgtacgaacttgaagtcaacgtcatcgaccaggccggcaacatcgtcgaggccgtcgttcagaaggtcggcttccgtcgtttccgcatcgaaaacggcatcatgacccttaacggcaagcgcatcgtgttcaagggcgcggaccgtcacgagttcgacgccaagcgcggccgttccatcaccgagcaggacatgatcgatgatgtgattttctgcaagcgccacaacatcaacgccatccgcacctcgcactatccgaaccaggagcgttggtacgatctgtgcgatgagtacggcatctacctgatcgatgagaccaatctcgaaacccatggcagctggtgcctgcccggcgacgtggtcaccgccgaaaccgcggttccaggaagcaaggcacattgggaaggtgcctgcgtcgatcgtgtcaacagcatgatgcgccgcgactacaatcacccgagcgtggtcatttggtctctcggcaacgagtcctacaccggcgatgtgttccgcgccatgtacaagcacgtgcacgacatcgatccgaaccgccccgtgcactacgagggtgtgacgaagaaccgcgactacgacgatgtgaccgacatcgaaacccgcatgtacgagcatgccgatgtggttgaggaatatctcaagaacgatccgcagaagccgtacatctcctgcgagtacatgcacgcaatgggcaactcggtcggcaatctggacgaatacacggcactggagcgctacccgcactatcagggcggcttcatctgggacttcatcgatcaggcaatctatgccacccagccggacggctccacccgtctgtgctatggcggagacttcggcgatcgcccgagtgattacgagttctccggcaacggactggtcttcgccgaccgtactcccgcgccgaaggctcaggaggtcaagcagctgtactccaacgtccatatcgacgtgaccgatcgctcggtgtccatcaagaacgacaatctgttcatctcgaccggcggataccagttcgtgctgcgcatcctcgctgacggagagccggtatggcagtccgagcgtcgcttcgacgtgcccgccgattcggcatgcacgttcgatgtcgaatggccggtggatctctatcgcgccaatgccaatgagctggtgcttgaagtgtcccagcgcctcgccgaggcgaccgattgggctcctgccgggtatgaactcgccttcggccagactgttgtggccggaacgaaggcagccgaagacgcggccctgcctgcggacggcatcgtcactgttggccgttggaatgcgggtgttcagggttccggacgagagattcttctttctcgcacccagggcggcttggtctcctacacgttcgacggtcacgaattcgtgctgcgtcgcccggcgatcaccacattccgcgcgttgacggacaacgaccgtggcgccggccatggattcgagcgagcccagtggatggcggccggccgttatgcccgttgcgtggacaatgtcatcgaacaggtcgatgaagacacgctcaaggccgtgtacacgtatgagctggccacgccgcaacgcaccaaggtcaccgtcggatacaccgccgataccactggccgtctgaacctgcatgtggaatatccgggcgaatccggcgatctgcccaccattcctgcgtttggcatcgaatggactctgccggtccagtattcgaacctgaggttcttcggcgctggtcccgaggaaacgtaccaggatcgcaagcacgccaagctgggcgtgtggagcaccgatgcgttcaaggaccatgctccgtatctcatgccgcaggaaacgggcaaccacgaggaagtccgttgggcggagatcaccgatgaaaatggacacggcctgcgagtcagccgcgcgaacggtgccgcaccgttcgctgtgagcctgcagccgtattccagcttcatgatcgaagaagctcagcatcaggacgagttgccggctccgaagcacatgttcctccgtgtgctcgccgcgcagatgggtgtcggaggcgacgattcctggatgtctccggtccactcccagtatcacatccccgccgatcagccgatcagcctcgatgtcaatctcgaactgatctgacgatcggatagcatgtcactcctctactccttcctgtggaggagtgacgacatcgtcttgcaaggttccttcaccttgcattaaccggtgacgatgcttcataacgcagaggacgcggcatggattcatgttttccgcatgccgcgtcctctgctcatatcaggagaagaggcctgatgcccaagccccaagggttggacatcaggcctctttcatatggttttcataaagatggcacgaaactgtccctaaccaccagttttgcggaaagcctcatgcaatcgtaggagcacattcttctcaaacggtgccggaccgattgaaataaaaccagcatacttgcccttattcttgatgagatcgttcacatcacgatactcagttacatgcatgcgctcatcttccgcatgctggtagcaaaaaagattgcggaccgtcctcccctattaggaaagacggtccgcaacatttcgtaacggatataacgcaatacgttaacgccggacggatcccttgaatggcttatccggagatagcgcgacacgtcccatatcagtccccagaacgttcagcgtaatctccgtgggcttcgaacagcgcaacgtatattccactgtctgatccgtccatgtcgtatccacttggattccacctcttgcacggagcgcatggaagcttccctcatgccaatcctccggcagggccggaagaatgcgaatccagccatcgtggctttggacaagcatctccgacaaggccgccgggaatccaaggttcccgtcgatctggaacggcgggtgagcgcataatccgctgtcgtacacgcctccgcccagcagattggtttcagcgttcgcatccaccggccgcaggaacatgcctatgattcgtttggcatgctccgcatcacgcaggcgtgcccacatgatcatgcgccatacgatgctccagccggaaccatcatcgccacgcacttcgagggatttcctagcggcttcctccaggtgcggagtctgagacgtgatgcctgcgccaggatgcagttcgtaaaggtgggacagatggcggtgctgtggatcggattcgatgaattcgtcgttccattcgaggattcttccatcagctcccaatcgcgtttcagccagttgggaacggacggattccgcttcacggaccagatctctgtcctcttcgtcaaggttttccaaatcgtgagaagcctgaattaaatcatcaagcagattacgcacgatggccgttgcattctcactgctttgtgcaacggataccggttctccgttcaccaagaaacagttctccggtgatgttgcaggggacggggccagtccatgctttgtctccgataggaaatccatgcagaatcgcgcgttgtctcgcatgatcggccagatgcgggccaggtacgatgcatcttggttgaacaagtattcatcgaacaggttccggcacatccatgcctgaccgaacggccagaacgaccacatcgggtcgccgttcgcaggaagggccctgcgccagagatcgacattatggaagaccgccgatcctcggcagccaagaatcctgtcagcggcgtcgtgccccggcgctagcagctcctcattcatggagacgagcggctcgatgagttcttggagggcacatgggcctgtcatccaatagttcatctcgacgttgatgttcgtcgtgtaggcgctgtaccagtttgggaagtccttatggttccaaatcccctgcagattcgccggctgggtgtgtggcctggacgaggagataagcatataccggccgaaatcgaacattgcctccgccagcatctccagacgatgcggttctttgttctcatccgagcgaaggatcgccgagaacggtagttccgtatcgtcatcatgggccgaaccgagatggatggccaccctgtcgaaatatctgcggtagtccgcgatgtggcggtcgagcatggtctgcaggtcggtcgaccactcgtcgatggttttctccagatggtcggcgataaccgtcatgcttcgttccggctgctggtcgcttcccttgaatccgctcatactgcggaagcggagcgataatccggtgatgttcgaacattgcagactgttgtcgctcacattgatgtcgccacctgttacggtaagggagaacgcaccggcgtacgccattccggttccgtcctgctcatcttcccaaggattttcagaaggatgaggcagaagcccgatgttgagtccaggcatccggcccatgacgatgagggtggcccgatgaccgtcggatactgtttccatcgaggcgcgtgattgcttgaggaaagtgccggagacgctgatgttcacatcaaccggcgcatccgatgacatcctgtagaccaacaggtcatcaggctcgctgcaccatgcgtcgacatgaacgttggcatcacccatctggaatgtttcaccggcgagcgcccttgcaagatccagttggcgtttcatgctctcacgtccgcttgcaggggtcgagtactgaatacgggccgttccgaatggctcgtaaatctgttcgtccttttcctgcagtgtggcttccttgatgattcgcgtggcggcggtgtaatcgtcgccgaatgccgcctgacgtgccttggccacaatctctggcgtcaccggcgaggtttccgcgtgtggatatccagaccaaagggtgtcgtcgttgagatacagcacatcggtttccggttcggagcacaggaccgctcccatgcgtccattgccgagtgggataccttcttcccagcacgaagagattccatcgaatgtgagtttcatgcgtaaagtctccttggcagatttgcttatttgagaatgctctggatattgcggtactgctcgtcggtcagctgcacggcgggttcatggatggacgtgtcgattggcagtcccttcgccttgaccgcgcccttgatggcgctgatgaacaggtcggcagtgtcgtacaggcgcatcagataggaaatgcgttcagccgatttgatggccgtggcgtaatcaccggactgccatgcatgatgcaggctgacgaaagtctccggctccacattggtcaatccgcacagcacgccattgccgccgctgattcggttaacggtgtagtactcgtcgaatccggacagcacgctgaacgatggattcaccttacgaacggcagcgatgacctttctggtgtggctgatggtgtcgacggtgtctttgatgccgatgatgttctggttctccgctgcgagatccgctaccagctcgggtgtgaggtcgttgcctgtcctggctgggaagttgtacagaatgaccggcagcgtcgttgccttggccaccgcagagaagtagcgcttcgcgcaatccggggatggtccgaaatagtacggggatactgcaaccaatgcatcggctccggctgcttcgctttccgccgccaatgttctcacattgtctaggttggtgtctcctactccgacgagcaccttcatacgtccggcgactttcgaaactgcgaaacgcaccgcttccgccttcgtcttgacgtcgatggcgtagaattctccgatgctgccgaacagcagcacaccgtcgatgcccgcgtcgatgagatgaccaaggtgcttgccccaattgtcgtagtcaatggtcccatccgcgttcgtgatggtgatggaggggcagaacacgccttcgaattgggcgttgcaagtcatgatattttcctttcgacgatatggtaggcgttccgcgcgttattgaggaagaagtcgtcgtctcccgcgaaacggttgagcagaattgacagatgactgtcgaaatcggcgtatagaccaacgacaggccaattcgacgcgtacagcaaccgcttgctcgagaacgcggcttgtgcgagatcgagcaaggttgagacgaatcgtaggtcatcggttggataccccgataccttgacatacacgtttggcagctctccgagcctatgcagggcatcggatgaggattcgagattatgaagattggatatgttgcccatatggtcaacgatgacggttgcttcgggcacctgctcacaagcctgagcaagatcgccaagttcatccacccgtacgcatgcgtcgaatggcatgttcttatcggccataagctgcaaaccgcggatgaagtcatcttgcaggcaccgtccccgcggcgatgtcggcgtatgcaacggctcacgaacaccatgcgcgtacagcggcacgcgcatggccggtccgacggtggaccgcatagatgttgccaacagcagaggatcatggttttcggacagcagccgatcttccaatgacgtatcgtccgtgtcaacttccacatacacaccgccgatgaaattgaccgcagcgtctgggtggtgctcattgtatgaggcataggcgcgtttgagacagtccatgtcgtaacggcgggtgatggacccatccgtaccgtcgagccatgaaagcggttggacggatgggtcccagatatggaaatgcgagtcgatgatcctctgcatgtcgcgcgtcctagtcgagtgccctatcgaggtggacgtatccgccgtcagggaagacccattgtccggtggtgtgagaggacctgtcggacagaaggaaaaccacggtgtccgcgatttccgaagtctcggtcatgcggtgcccaagaggaatcctgtcggtgatcttcgccaactgctcacgctgcgcctgctcgtcgccgaacgtcttgatccattgcgcgtacagcggtgtccacgcttcggccacgacaacggcattgacccggacctcgtccggggcgagagcagcggcccactcgcgggtcagacccagaattgcaccttttgccgcagcgtaggcgctagtcttgccctgaccggtcaatgcggtcttggaaccgatattgaccaccgagcccttgctggccttgagcgctggcacgcactgatgaaccagctcataatagtgggtcagattgccatgaagagactcctcgaactgacgccatgacgtggtctcgagcgcgaggttgtcgtttctgccggcattgttgaccacaccatcgatatggccgtatttcttcatgaccgattcaacaatgggggcgatctcatcagtgttgttcagatcaatcagataggtgtcatacgaatcggtgatctgttcgatatcctgtcggaattcgtcgtcggcaccatccgaacgattcagcaccactggaatggcgccttcttcggccagtcgcagcgttatgcccttgccgatgcctttgaatcctccggtgacaataatcaccttgttcttaagatgcaggtccatctcaggtccttccgactagtccttgtgcaggtacttcatgcattcgtcgagcttcatctccgtgccgttgcccggagcgagcggcgcgacgtatcgtccgttcttgatgacggtcggatgtacgaagtactcatgctggttgtccacgtattcgacgacgcggtcctccatctcgccagagacggacacataatcgaacatcgcaagctggctgatggcttcgcacaggccgacaccacccgcgtgagggcagaccttgacgccgaacttcttggcgagcaggtattcgaggacgatttcctgggggccggcgactcgggtcgcgtcaatctgcatgaccttgaagctgccagcctgcaggtactgcttgtacatgactcggttctgcatctgttcgccggtagccaccggaatcggatcgatggccttctggattgcggcatgtccaagcacgtcatccgggcaggtcggttcctcaacccacgcgagatcgtagtcattgaatttgccgatccattcaatggcctgtggcacatcccagacctggttggcgtctacggcgatggcgatgtccgggccgaccgcttcacgggcgagcttgagcctgcgcagatcgtcttcgaggttttgaccgaccttaagcttgatctgcttgaagcccatgacctcggtctcttgcttggccaaacggaccatcttctcgtcggaatagccgagccatccagctgcggttgaatatcccggatagccgacttccttgaggtgggcgatgcgttccgccttgccttcctgggcggcacgcagaatctcgatggcttcctgcggagtgagggcatcggtcagatagcggaagtcgagagtcgcaactagctcttcaggctccatctcggaaaggagcagccagagcggcttgccggcgcgcttggctttgaggtcccacagagccgaaagcacggcaccaatggccatatgctcgacacccttctcagggccaagccagcgtagctgcgaatcgcgcacgaacagatcccacgcgagacgcatgttgtcgagcagttcctcgacgttacggccgataagggtttcagacatggagtcgatggctcggacgacgacatcattgccgcggccgatggtgaagacgaatccgttgccggaatcaccggcatccgtggcgatgacaacataggcagaggaataatccggatcggggttcatggcgtcggagccggagaaggtggccgatgtcgggaatcggaaatcataggtggtgactttggtaataacgctcacgatgcgcttccttctttggaaaaatgtttaatctcaaaaagggagggcggccattcggccgccctccctagcggtggcgggcaaccggatgtcagtcggcgtcagtggtgaccttaaagccgttgtcttccgcgtatgccttgagcttctgctgagccttggccatggcgcctaccagatcgccgttctcattcatctccggcacgatgacgtcattgaacacgacctccacctgagacatgaacgggagatactcccaatcggtattgacgttatccatggaatcgaaatagaccgagttaacgtccgtattcgcgaagtatccatcggtttctttcttctcgcgcaccgtcttatcgtcctgatagacggaagccgccatgaagtaattgccgctgttggtatcctgccaagactggatggcgtccggagcggaatcgagccagttgatgaaggcaagggctgctgcttgcttttccttcgggcatgccgcagcaacgctcatcatggagccgacggaggaggactggaaatgctggttgttccaggatggcggagttgtgaccaccatctttcccttgaggctcgggttctggtccttatacatgttgcccatccagttttcgctgatgaaggtggcataacggccatcgttgaccgaacggttgaactcgtcagtgtagacggtaccgccttcaaggacgccatccttcaggcacttctgcaagaattccgtgaattcctttgcttttccgctgttcatagtcagttcgacgtcgttcacggaattaaccttccacagacgcgctccaacggagcggtagaggttggtgaagatggagatgtcagatcccaggattcccatatacttgttggaatcttctttgtggagcttcacgccctcgttgtagatatcttcccagctttctggcacctgcaggttatgttcgtccaggatatcctttcgcacatagttggccaatggcgtggcatcctgtggcacaccgtaaaggccgccggcgtaatgcacctgagcccatgcagtcttggtgtacaacttgctccatgccttgtcgatgctgtcgttggcaaaattcagcaatgcgcccgaaaccgcaaactgctggaatttattagcgctcatctgtacaacgtcggggatgtctttattggcctgaacgacattctggaacttggtgaaatggtcggcagcggcaccggtgttgacaaatttaatcttgatatgcggatacttctccttgaatgccttgacggtgggctccatctgcttggcggaataggcccaaacggtcagctcgacgttcttcgacgtatcggtcagagcgctttccacttccttcgcggtcacttcgctcttggcctggcttccgttggtgtcggaaccacatgccgagatcccggccgtcattgccagcgccgcgatagcggccacaagcctgacactcttcttcttcatgattactcctttgtgtgtcatgaattactattttgttgttttttcaaaaggacggatgccgcacggtcaccaaggcaacgaatgggtgatcgtagggaccgtgcggccgagggttcactgcttgacagaaccggccgcgaggccagactgccagtacttctgcaggaacatgaatgcgatgatcaacggaacaactgcgataagcgagcccgtgatgatgaggttgttcggaacctgaccgttggcagttccctgggcacccatcttcagccacatgttcagaccgactgtcaacgggtagtcgttggtgtccgagagcataatcagcggcaggaagtagttgttccagacgccaaccagcgtgaacagcagtacagtgacgaaacctggagacagcagcgggaaaccgaccttccagaagatggtccaagtgcttgcaccgtccagtttcgcggcttcgatcagcgagaccggaatcgaggtctgcgcatagatgatcatcaaatacaagccgaacggcgtagccagctgcggaataatcacggcccatggagtgccgaccagcccgatcttcgaatacatgaggaacagcggcacggtgattaccgtagaaggaattgacatgaatgccagagtgacggccagcagggcgttacgtccggggaatcgcatggtggcgatggcatacccagcgaaagtggcaatgatggttgcaccaacacctgctaccgctgcgtacatgatcgtattgaacagccagcgggtataggcgccattctggtaggcgaatgtgtcttgcacgttctgccagaacacattcttgtcatcgaaccacagaccaaaagagctgaagatgccctcactggtctttgtggaagagaagatgacccacaacagcggcacgaggcagtagatgaccatcaaagccataatgatgtgcaacagccagttgagcacacgctgcttaccagtcagtttcggagccggctcacgctgctgcatgcgcttgtaacgcttgcttgccttgagcgccagcttggcatccctgcgctggagcgacttggcacgaggttttgcgattgcttcactcatcacttgttctcccacttgttgccgatgatcttaacgacggcgaccaaggccatgacgatgatgccgacgaccagagagacggcagcagcatagttgacgttctgaccattgaatgcgaggttgtaggtgtagatgttcggcgtatagctgctgttgatcacgtccggggcagaagtacgcaagatgttcggttcgttgaacagctggagcgtaccgattacagagaagaggactgtcatcacgatggtgctcttaatctgaggaatcttcacggaccaagcgatgcgcagctccgaagcgccgtcaatacgggcagattcgtacaggtcgttcggaatgccgatcagtgcagaataataaatcagcatgttatagccaaggaagcaccaagtgcagatgtttgcgatggcgaatagcatgagctgcttcgacagcatattaggagccgttacgtcaagcatgccggcgatttgtccaaaaagaccatacttatcgccgtaaatgtatccccacatcagcgctgcaatgacgcctgggacggcataaggcaggaacagcaggattcgcggcactgcgatatggcgaattctctgggagtccaagataagcgccgctacgagggacagaatcagattcatcggaatctgaatcgccgcgtaaatcagcacattcttaaagccgccccacaaagcctcatccttgaatgctcggatgaagttgtcgaagcccgcgaatgtggtgccgccgagaagggactgcttgaagaagctgagataaagcgcgtagaacatcgggatgatcatgccgaacaggaagaccaccacgtatggaagacaatacaatatgcctatgtactcgcgcttcggcttgcgcatcccggaagcatccggtttcgccgttgcatttgtcatagtttttctctttcttcttaacccgtctgaatgagcctgccaacaacatcgtcgccattgccgtttcatccatcggtacgttcaatatacaaggttttgtaaaaaagagcaaataaaacttcgttgcatgtgacgaaattttctttatcttgtttttccgccttaaaagggctttattgcaacgatatatgcacatcagatctatcaagaaaacagcaggcaatcgatgtccacgacacccattcccgctatataggtagcaacacgccgataaaaaatctattttaaagtaacgaaaatttcgctatcctataggtaacgtttttgcagcgtcgcgtacgaaaagagaagggtcatgaccacaatcaaaacaacaaatagaccgaaggtctccgatatcgcccaagcggcgggagtatcctctgccaccgtgtccaaggtcatcaacggccgtgatggagtctccgacgagacccgcgatagggtggaactgctcctcgaagaagccggattccgcaaaaaacttcccacaaccaaaaccatgcggtcaatcgaactggtcgtcaacgaaatgaccaacaacggatccgtggagatggtcaaggagacaacttcatacgccaaagagtttggcatcggcatcaccgtaagctgcgccggaccggatttcaaagaatacacaacgagaaacgagaccagcaactgtctccgtagcgccatcgaacgcaacccattgggcgtcatactcctcttatcaaatatctcatcggccgaggaatcgctactgcagacgaggaacatcccatatgtaattgtcgatccggtcggacaggtctccgctgacgcattgggggtgggcattgataactggaccgggggaatgcttgccacgcaatatctcatatcattggggcaccgacgaatcgccgtcatcaccggccctaccaattcacaatcctcacaagcgcgacttagcgggtacatggcggcgctgcagaaaaacggcatcagcgcggatccgcatctcatcaaggttggcgactacgtatccgacaaggcatacaaggcggcatgcgatctcctggaaatgagggagcaggaccgaccgaccgccatcttcgcgttcaacgatctcggcgcaatcaacgtctatcgcgccgcccgacagcacggcatcagtctgcccgaacagttatcgatcatcgggttcgacgacgtctatcctgcggcaagcatgtgtccatccctgacgaccatcagacagccattcgacctcatcgccagacaatgcatcgatctgattctcgaagcgcgggaagggaaggtggaacagaattacttcattcttcccacacagcttatcgaacgcgaaagctgcgtatcgccagcactgccgtaacatgcagcggcactcagaatcagcttccacgaagcgcccatgcatatgcaatccgtctctgccacaagcatttacttctgtttaccagatgaaaatacaaaagaagcgacgaaaccggcgagaccccgcaccagaagggtgcctacaatgaagccacaacagaaaaaacggctccgcacgaagcatgaaccaacaaacgaaatgacgagccgcgtgaaaggaagaaaaaatgcagaacaacaccttcgaccagatcgccaacgccaacaccgtttccatggatgccggcctcagccagttcgccttcgccaaggcctcctccaccttgttcaagaaggttttcagcaagtagtattccaaaaagtctttatcaaacgcctcggctgctgtgatgaaccggtccagcagccgaggcgttcccatataccttggaccgtccggcaaccaatcgcaacaaatcgtatttacgcgccgatcaattcgagcatctgcggaatgctcttcttgccgaactcgacctgctgcgtgccatcggtttcgcgctgtggttctcgatcgtcacgccgctgaccgaaatcggtctgttaccaatcggctcccgtccggccaagcgtgatctgggcgccaaggcccttgacgatttgcaccatcccgtggatcttctcctgggcgcgggcgcgcatcaatctggccgcatggtacggcctgggcaccgcatgcgaacggttcggtgatttggatatgctgcgccaagagggtggacaaggaggagctctcgcagagccaacaggccggattcatctacctcatcctgtacaccgtctccggcttccccgctcgcaccatccgccaaaccacagcgatgctgatacttgccgatggagggttcaggcccaggcgattccgaaaaggtcggctctgctctcatcggacgtcttgagcagacgccgcagcaggaaagtcgcgaaatacggggccgtgaagattccatcgctgctgccgacgttacccgccgtcagcttgatgccgaaccggatgtccggatacgagtcagacgcaatcagcgtgcgcaatgatttcgcggtgccgttcttcgacttcacctcaacaggaatgagcgcgtctcgcgaccttacgaagaaatcctcctccaaagtggagttctccctcttgtagtagtagaggtcgtagccggccttacgcagcgcctccccgatcacgctctcgtacaaggcgcccttgtatatgccaaggttccggttcgcgcggaaatcgtcgctggcctcgtcgtccagcatggagacgaacagtcccgtatcggcgaaatacatcttgaatttgttctcgtcataattgccccgcaaaggcaattcggggaacgacaggcaatggcacacattcacaattcctgcggtttccagccattccacgcatccgcggtagtctttgaagcgcgctcctttggcgactttgctgatctggaacttcttgttctccttcgccagctggaccgggatatgcctgaacacgttgaggattcgggcccggtccatgccgtccgcgtatttctggatgtcttcctcgtagtccagaaccagctgacgttgcatattcaaggtgccctcgaaggtgccgcgtgcaatgtaggaggagacgacctcaggcatgccgccgatggtgcagtagtcgaggaacgccgaagtgaatgtgtccatctcgatccgcgagaagggccgtaacgaaatcaaatgatcgaacatggattcgacgatcgcaccgtcgaatcccttggcccacaggaactcctcgaaatcaagcgaacacatcccgtaatcggtcttgtacccgacgctgttgctctcgatggtcttgtaattaatccccagcatggacccgctgcagatgacgtcgaaacggccgtcctgcctaaagaacttcagcgtcgtggcgatgtccggatgatcctggatctcgtcgaagaagatcaacgtttcatggggaatgaagcgcagtgtcggatcaagcagcgacatgctcttcaccacttcgtcaacggaatatccattctgcgtaatcgcacggtatctgggattctccacgaagttgatctcgacgacactgcggtaattggcggaggcgaaatgcctgatggcggccgttttgccgacctgccttggccccttgacgataagtggcttgcgattaccgtcggccttccaatccaagagaaaccggtcgaccttcctgcgcaggtacacgttcccccactccttccaaaacatccaacgctctcattctgcatttccatgagcgagatttgacatcactgtaacatttcatgagggacatttcgagtcatatacacattttatgagggacattctctgaaccactatcatatgcccaaggcgctgcagcaggttcgcagaacacggctgatcgttcggctgactgtctagataggcgagcggggaggttccccgctcgcggtcgtacggtcccaaactggccgtcggcggatgatcgcggacaagcgcgggaacaccggtgacacggacggtatcaaagcgaagggcgcggtggaaaaccgaatgccagacctacccgtcatacggcgcaatccgtattcgcccacaccctcacgctggcagccatcgtggcccccacttctcgtcaagaatcatttgacagatctctcagatcttacggcgaagccaattgaatatatccaattctctaattggagggtgtttttatgttacctgttaactaatgaacagcacattaattcccttaaactgcgctaatcgtaattagcgcaactcacttgttcgcagctcaccggatgatccgtgagctgcaaacaaggatgagaacggtatgcttaaaatcgagctaaaaggtgattccaaacatattgtcattgcatggcatttggtcaccagattccataccgagtgtttacgcgccgatcaattcgagcatctgcggaatgctcttcttgccgaactcgacccgctgcgtgccgtcggcccgtgtgatgacgatgcagggcacgctcatcgcgccataatggtccctaagctcggggaagtgcgcaacatcgtaggcctcgacgcgcacggccgggttcagcgaggcgatacgctgggaagcgagcacggtctccgggcacatcgtgcaggtgagcgagacgagaatcatgatgtccaacgggcttgcaatggactttgcccgttcgatcagatcatcgtccaacggctgaccgggaccggccacgttgtacaggcccagcacgaacgaattgaattcatggccggaaggcacaccatggaaggcgaggccggtcggctcgccgtccaccaccatgcgcacacatgggcgcgcggcgggcagcacgctgtcgacgtcgaacaccgcacggcccgtatcgtccttcttgtactcgccatcaaccaccgtcgatttcagcttgccgccggacaacgcgaccaacgcatcaatgaatccccgcagttccgtagacagcggcgtatcgtccagctccaaagcaagcgtgaccggccgagacatgcggccaaagaccacgttgagctgctgtctggtggcgtcggagaacaattcgccgggtttcctgacggcgttcgccgcggcagcggcatcggcgctgcgttgggcgggtgccggcgcgggcgtggtgccgaccaccgaggcggcagaggcggccttcgcttcggactcctcgtaagcggagacggtggggcgaggcggcaccatgccggttttctcgctcatctgcttggcgtaacgctccagctccacggcagcaatcgcaccatcggcggtggcggtgaccacctggcgcaggttcttgacgcgcaaatcgccagccgcatacacgcccggcaccgaggtttcaagatagtcatgcgtgaccacgtaaccgtgatcatcgagctccaccacgccgcgcaccaaatcagtggcaggcacatagccagcaaacacgaagacaccaaacgtgcccgaatcggcgggcttccaagtttcggtctgaccggtagccaaatcaagaatcgaagcctcacgcaggccgccctgaccggcagtgacacccttcagttcgacctgatagcgcacgtcgatcttcgggttgtttttggcctcggcggccactgcggcgtcacaagtgaagtccgattcacgcacgagaacagtgactttggaggcgtacttagtcaggaacacggattcctcggctgcggcgaaccctccgccgaccaccagtacttccttgccggcaaagaactcgccatcgcaggtggcgcagtaggccacaccgcgaccagcgtattcggactccccttcaaaccctagtttgcgtgggttggcaccggtggcgatgagaatgccaaaagccttcaagtcgccgcgcgaggtatgcacggttttgacgtcgccatgcacgtcaaggccgatggcttcggcggataggaattcagcgccgaagtcctgcgcctgttgacgcatggtctgggtaagtgcacgtccagtggtgcggccgacgcccggatagttgaccacctcattggtgatggtgatctgtccgccgaaatcgtctttctcgagaatcaacacgcgatatcgggcgcgggccagatacaatcccgccgtcagaccagcgggaccgccgccgacaactatgacatcgtacaaatcatcttgagacataacgactccctttgtgccttgatctggctgttcgaagggttgcccggaggttctccgggcaaccttgtcggattagattgataattcgtccatcaagcgaatatcacagttggccaacaagatcgaggctgggctcgatggtgtcctcgcccggagtccagttagctgggcagacctgatcgccatgttcgtggacgaactgagaggcttgcacacggcgtagtagttcttcggcattgcggccaacgttggaggagatgacttcataggccacgaccttgccttcggggctcacgatgaaatcaccgcgttcagccataccatcaacttcgttgtaggtatcaagatctttggctaatagagcggtcgggtcggcaagcatcggatattgaatcttggcgatcttttcattggcgtcatgccatgccttgtgtacgaagtgggtgtcgcaggagacggagtagacctcgcatccaatttccttgaacttggcgtagttgcgggccagatcctcaagctcagttgggcacacgaaggtgaaatcagccgggtagaagaagaacagggaccagtggccgagtacatcagccttggtcacctcatggaactcgttgttctggaacgcgttcaccttaaaatcggtcagttcatgctgtagaagagtcatcatcggtcctttcgctgattgtcaatcatcaggctcctgccgttctccatcgtaacgtgattctctggaacccgcgcgggcgtaacgcgtgagcctcatcacatcattactaacagtcacgctgacggaccatgcgatgcgagggtgttgtggaataaaagccttccgcgcgccgcgggaaacaagaaccaaaagacgaacaagaaaagggttcccggaatgtcacgctcggaaagcccccggggaaccgggaggcaaaacaagaaaagggggttcccggagccttacgcccgacgggaacccccggaaacaagaagaggatcctccgggaaccccgccacggggctcgaccggaggatcctccaacgttgaatgcggcggcgtgctactctcccacaccctctcgagtgcagtaccatcgccgcgaccaggcct

SEQ ID NO: 3018 - DNA, 11585 bp, Unknown
  R19_24m  MAG No. k141_16520
atatgcccgaagtggcaacaattacaagttatcccgcaccatcgcaacgacatcatgattgattttgttgatgccggggtcggcaagcatctcatcaagagtcatccagcggcagtccttggcaccaacatggaactcagtggaacgccaggcgtcaggcattaccgttacgctagcgcggtatagcgtgtattcgtaataacgaatctctccatcatgctccgtggatggcttctcagaatccttcacacaaatgtgagacagagtaaagtctttagcaggaatttcgaattcatcggcaaaatacgtcgtcagctgacgaacatcctcatcagtactgcttgcggttgcatgattagggaaaaagtcgcatccccaacctaaatcacgatacagaagatatcggttagcgtctttcaccgcaatgatcgagcttcttcgttcggttctatccatgttggcgatatcctcatacagtgttatggcatcatacttatttctgcaagcagtaatcaaactccatactccatagaatatgaagataatgctcaatgcaaggagcaatccttgaaacatttggtcgagtccagatgtgagagcagcaggaatgtaaaacaatccttcgatgatgatgacgaccccattggcaatcggcccgaaaccaatctgctctttgtgctcaaagagcttggcacgcagttcagcttcgtcgattctcaacaccatgagtactaatactactcggggtagctcacccttccggtattcccaattagatacaccaacatataaatagtggagcggatgacgggaatcgaacccgcgtaatcagtttggaagactgaggctctaccattgagctacatccgcgttaagcgtcgcttttggcgacttgagttattatacatatttcttcggggatggcaaacgcgtgtggctgcagcaggaccagccaatctagttgatggattgtggctttgccgaggactcccctcagtcgcctacggcgacagctcccttcaaagaggggcgctggaaaccgtcgaaatcacaaatggatgagctgggactcgtatggttggaggtcggcgcccatcgcattcagaatcacgaaccagcagttttcgggcagcgagtcgagcttgtcgatccggttcttgagcaggcgcacgtcgcggctggtgagcgcgccccacaggttaaccatgatggagacgttgtacagcatgtagcactcgggggcctcggacgctattccacagaaatcgtcaccaccgctgaggcaatcggaccatcgtggctcagggaaatatggatatgcggcatcgaccccgcaccgagagtcgagcgctgcgccgaacgcgcattccgccgctcctgcatcactgcataaggcccgttatcggaagcaggggaataagcagaggaatagcgagcgccggcagccgaattcgcgtaatcagtttggaagactgacgccgcccccttacccagagacacatgcggcacaccacgggaatcgtccaagatctcgatttcaggccacgggaaattatcaagcgtgaacggatagggggcatcgccaagataatcgcaccacgctttgaggaacgcctccttgcctgcccacttggcggccagatgcacggcctccccgtcattcttctggcgcgcgcggtcggatgcctgccgcatctcacgcacggagaacagcgcacgcatgcgagaccccggctccgccaactgttcggcgaatgcggccacatccaccacgtcatgccccaaaccacaagtattcatgcttcccattgtgtaccgcttcgcgcgtaatctctacacctcatcagaattggggcctgatttccatttcagggggaaaagattcactatgctggatgacctcgcgcaataccgcaaacatcttgggctggctgcctagccgtccaaaaaaacatccgcgccccgccccggaggtctatctccgtttcgaggggcggattttgaccgttccggaggtctacttccgtttcaaggggctggtcatcctccataccacgagtatccgcagcataacgccaacgccattccgccgtttttacgccttgtctacttgggcaacagccccttgaaacggaagtagacctccggcgaatgccaaatcagccccttgaaacgcagaaagctcactccgagggaggggctttcgtatgttctgcatatttctctcactgagtttgtgccagcgagaaagctccaggggaaactcccctcacccgcttcgcgggagctcccctcaaagaggggagccgagatccggtgcgctactggctcccatcaaccgaggggagccagaggaatcaggcctcgtagtagccgtcggcaccgaggcgggcgtccgggttgaggagcatcgccttttcgacctcgtggtggtcgtagccacggtgatcctcgcggaagcgacggttgtcgatcggctcgtagagcgcggcgcgacccatcatgccttcctcgaggtgacgctggccggcggccaggcgggcgttggcacgctcacgccaggcttccagcgcggcctcgccatcggccttggccacggccgcttcgaaggcacccggatgaaccagggccacgaagccggaaacatgtccgaagccgagcgaggtggccagaccggccttgaccgggcgaccagcggtctcgcgaccgaactcgtcctcgccaccgccgatgcgcaggggcttcctaacccagaccatgtgatcgtcgcgctggagcttcggatccacgcagtcgagcgccgcgttcgccggaatcacgccggacttgaacagctgcgtcagaccattgacctggaagatgcaggcaccacccttggcgtggccggtaagcgtcttctgcgagatcacgaacagcgggttgccgtcggtgcggccgatggcgtgggccagcgtgttgtgcagctcggattcgttcgggtcgttggcgttggtggacgtgtcgtgcttggagaccacggcgatgtcgtcggctgagacgccgagcttagccaggtcgtgcacgagcttggagtccttgccaccgaggccggcagccagggcaccgaggcccggagccgggatcgaggtgtgggcaccatccgcgtaggagtggatgaagccgaccacggccgcgaccggcaggccgagcttttcggcgatgtcaccgcgggtcacgaggatcgtgccgccgccctgggattccaggaagccgccacggcgacgatcgttcgcgcggctgaagaagcgcgcgtcgatgcccttgccgtacatttcctccgagttggcggtggcgttcatgttgccgaagccgatcacggattccacgccgatgtcgtcgatcgcaccggtgaccacgaagtcggccttgccgagggcgatcttgtcgacgccctcttcaagggagacggccgcggtggcgcaggcggagacgggctggatcatgttgccgtaaccgccgatgtaggactgcatcacgtgagccgcgaccacattcggcagggcctcctgcaggatgtcggtcgggatctcgtggttgaggaagcggtcgaggtacagcttgcgcatcgacatcatgccgccaaagccggtgccctgggtcgaagccaccagcgaggggtggatggactcgaggatttcggccggggtgaagccggcgcccaggtaggcgtccacagtggtgacgatgttccacagggcgatcttgtcgacgtcgccgaccatcgaggcgggaatgccccatcgggtcgggtcgaagcccttcgggaactggccgccgactgtgcgggtcatggtggcgcggcgcggcacgcggatcatcgagccggcgtggcgggtcacgttccattcgccggattcctcatccggggcgatggtggtgtgagcctcgtccaacttgacgtattcggcggcgacttcgcgggtgggcacagagaaggtgacgtcgtggtcgaggaagacctcggcttcttcttcgtcagcaccgtccttgtagtcgttgcccatgccttcctcgaacgggcggatgccggagcgggccacgacctcgtcgtggtagcgctcggcgatgtcctcttcgggcacgaggttgccgtcggtgtcgtaccagccgggcttcgggctgtcggcccaagtcagcagacccatgttccacgcaagttcgagcactgcgccggcgctcaggtcgacagtgccatccgagtggatgccgagctcggcctgggtgcgcgtacgaccggagccccacgggcccagctcaccgacggaaacgatgacgatttcgtctttcggcttggcggtgacgttggtccagtcggcaaggtcgaccgaagcctgcttggtgacgatcggggtgggcagcgccttgatttgctgcccacgcgaggagtcagacagtccagtggactgtccggcgacggagccatccgtttcctgagacgaggccgcagcagcttccttctcgacgtcggccatggcttcggcacgcagggccttgatgtcgatgggctcggagccgaggccaccggtcaggtccacatcgagcggggccttgatggcctgctcgcgcgattcggcagtgcacaggtcgagcagcttggccgcaatctgcgcggtggagtaggtgtggatgccgtgacgctcaacgacggcgaccagcggatcgttgccgcccatcaggccggtgccacgcacccagccgatcttcgggtgagcgaaggtgacgcggctcgaccacaccttttcggcgcgggcgcggttgacgatggcgtcaaaggcgctcttgacttcgccgtaggcaccgtcgccgccgaatacgccgcggttcggggagccgggcagcaccacgtggagcttgtgctgcacgttggtgtcggcaccgatgtggctgaagccgacgatggcgcgttccacgccccacagcatcagtcgcgcctgtgattcgaacaggtcgccggagtcggcgagcgtgccatggaccggcggtgcggcgaacgggaagaacagggtcggctcccacgcgggcttcagaatcgtggtggtggcaccggaggtcttcttctgctcgtggcccacccagtcgaccagagcgtcgacgtcgcggtagctggagaggttggccggaaccagccacagcttggcgttgccggtagcgtgctcgcggtaggcctgcttggcccaagccttgatggacggcttgaagctgtgcgaagtggccaccacagtggcaccgcctgcgagcaggccttcgaccacctgagcggcaatcgagttcgggctcacgccggtgacgatggcaatgtcgttcgcgtaacgggaggcgttcttgttggaagcgacctgttcgagggcctcggagccggccttctggaaggcggccttgagctcatcgttgttcgacttgtcggcgaaccactgggcttcggcggcgatggtcttgccaaggccgatgaagctgccgttcaaggcggcggagtcgttgccgtagtaggcgcgggcgaggtcttcacgggcggaggcccaccggtcatcgaagaggatggccttgttggcgtcgaagcgcggagcgacctgcttgggccagtcggagccaagttcggcttcgaccgcggccacgacggcggcgttctcgtcctcggattcttccggagccggagcggccacgccgagctcgttcagcacgaagcgggcggtggcggcgagcacgccgttggaaccggtgaccttctcggcgaaggcgtcgagcgcggcggaatcgaccacagcgccaccagcggcaccaccggcggacggcagggccacggcaacacccttgagttgggcgacgacctcaacggccgcatcgatcagcttgtcggcttccggcttgttctgcacggcggcggtgggcagcttggccaggtcgccgccacgggagctggcaccctcgcgagtgtcgagcagcagtgcggcgagcacgctggccacccagccttcgccgagctgccatacgttggtcacgcggtcgcggatgtgctgctgtttgacgccggcggcaccgaacagcgagcgcaggcggtcgcgcagcgcctcggagagcacggcaccgaacggcttgtagttcggggcggccttgttgacgatttgggcgagcttgtcgagcgtcgcttcagcagcaccgtccacgctggcgactcccagctcggagctgatgtccatgagcagctggttgcggcgagaagagacaccgttggtcagggtgtcggtggtgtcgttgctgccgatctggtcgaggcgcaccttggcggagtaggccatgagtacgccgatggcatcggaagccttgaagggcaggtcggcgacggcggaaccagacggtgcgccagcagcggcctgccctgattgcaggccgcgcgaggagtcggacagtccagtggactgtccggcgacggagccatccgttgtctgagcagcctcagtcacggcatttgccggagcagcacccgatccgagcttggcgacggcggaaccaccggcaggagcggtttcgaccggggccgaggccgcagcctcttccggctcgtcgtcgggaaccagcgaatcggtgtcggtcatgtagacacggccttcatcgcggccgacgttgtagacgaccgtatcgttgccggcgaactcgggcagacgtagggtcttggtaccgaggttggccagggtcggggcgttgccgaggccgacttcgacgtattcttccacgccgaggccgccctgttcgcgctgaccgaagagcagcgcctgggtttcaatccaacgcaccggggaggcgaactgccaggagagcagttcggtcaagagcagacggccgagcttctggtcgtcggcggcgtaggaatcccacacggccgggtcgtcgagcacggccttgatgcgttcggacggcacggcttcgaggatcttggcggcgaattccttggtcatctcgaacggggtggccaccaggttcgggatgtagcggtccaccagacggccacggtagtcgatgtaagcaggaagcagcgcgtcgagcttgtcgcggaattccggcacgcccttgcgcagtagcgtggagtggaacggcacatcgatgccgggcaccagcatgaacgcgggcttgccaccgaatgcggccacgcggcgggcggaatcggccttcagggccttgagtccggcgatcgtaccggcgatggcgtactgctggccggcgaggttgtagttcacaatctccaggaattcgccggacgccttggccacggattccacatattccttgacgtgcgcgtcgtccacaccgaactggttcggacgaagggcacccatgcggtagttggagcgaccctgtgcgtcacgctcgatgaggtggtgcatggtggaaccacggtggaacacgagctccagcacggtttccagcggaatcacgtcggcgaacgcggacaacgcgttgtattcgccgagcgagtggccggcgaagtaggcgggccagatgtcggcgccggcttcgcgcagacgggcggtctgagcaaaagcaaccgtcgcgagcgccacctgcgtgaactgcgtcaggttgagcaggccttcggggtgacggtaggtcacgccgttggcggtgagttccttcgggttgtcacgcacgaggcccaggatcgagaagccgagcttggagcgggtgagcttgtcggcgcgctcccacacgtcgcgggcggcggcggacttggcacgctcgtccagaaccatgccctgcttctggatgccctggccggggtagacgaaggcggcgcgcggtgcgcggaccagtgcggtgccgcgggagacgagctggccgtcgatacggcaggtgacttcgagggtcatgccgccgtggcgcactttgccgactcgctcgacggagatttcgacggtgtcgtcaagctggaccatgccgtacatgttgtaggtccagccggcaatctcgtagtgagcacccttctcgtcggtcgcctgcacggcgtgctgggcggtggcggacagccacatgccgtgcacgagcggggcggccaggccggagatgcgagcgccacgagtggaggtgtggatcgggttgaagtcgccggaagtgcgggcgaaggcggtcatgtcgtgtggggcgacgaccttcacgcggcgcagcagacggcgcggagtggcctgcactacttgcaggccgcgcgaggaggcggacagtccagtggactgtccggcgacggagccatccgcttccttattcaggagggcaccaccatactcgggggcgtctgcaggcaaagcatcggagtagacgcggccgcggatcgcgaaacgctcggtttcgcgggcaagcggcgtgccgtcggcggcggtgtgggtcacgtggatggtgaccacgcggccggaggcggactcgaagtaatcctcggcccaagacttcagggtgatggtttcgccggtgtgcttgagcaggtcctcctcgttcacctcaagttcgatgaggtggtcgaggtggacggcgttgagcaggccttcaatcaccgggtagcccttgacgtacacggagccgagcgccgtgtagattgccggccaggcagggccgaccagcgcatcgggggcgatgcggctgggctgcagggtggtcggcagagcggcgccagtggccgcttcgtggtcgaagccgaggttggcggatagggtgtaggttgcggttgcggtaccgaacggacgctcgtcagaggtcttgtcgtcaagctgcggcatctcggtgagcttgtcgccggtgatggcggtgttgccgatgcctgcggtggcggcgagcatcgcgtagacgtccggaatcaggcgttcgcggtccacgaccggcacacggccgggctcggtgccttccacgatgagcgggatgacgatatcgcgcacggcgtgcttggaggtgccgccgtccgggtcgttgtcccagtaggtgtcgaggtggatgtccagatcgtacttgccggccgcggcgtcaaacgcgcggatttcgtagtactggtcgcccagggcggtgccgtaggccgggttgtcggtgatgtggccgacccaggagatgttcggggacttgcggatgaagtcttcggcgctggtggcctcgccaagtgcggcgaaatcgtcgttctcagcggcatcggcggcttgctgttcgtcctgcacgcgcttgatggcggcggtttcgaagcggccgaggatgtcggcgatcggctcgtcgatggtggtgatgccggcaacggagatcgggccggggatggcacgcacggaatcggcggagtagcgctggtcttcggactgccagagctggtcctgaccccaccaacgcagcaggtcgttgtcgatgacgggtacgaacggcatgggcttggggtattcgcgcacgagcaccgggaaccaagccacgtcggtcgggaccaccttgagttcggcggtctgcgggtaggccagtgcgagcttttcgagcgcgggggccgggtcggcgagaatgtcgtcgtgggtcagcaggccagcggcagctgcctcttcagcagaaacgccatcagcggcgaacaacttggaggtgaattcgccggagtccgtgtcgttcacacgggcttcgatgcgctgcagcagatgctggaagcggtcggcgtaagtcgggtcgacccacgggaaggcgagttcggcgaagcgctgcgcccactcaaggtaggtcatggaggccaggtcgccgaagtaaggcttggcggtcttgttcagggcttcgatgatttccttgcggcgggagtcgagctcttcggggtgcttcatgacgcgcacgagcagacggccgcattcggcggagtcgttctcgagctcgtaaatgtcggcgtgcaggtggctcaggccggaggacatgccaccgacggacttgccggacggcacccagtgggcggcctgcggggcgaacacgtcgtcggacttggcgtcggccgaaataccgggcgtcttgacgagcagctgcttgacttcggggctggtgtgagcctccttggcggtcatcgcggcggtaccgataagcacgccgtcgaccggcatgtcgggcaggccgtaggcgtgggcccactggccggaaatgtagtcggccgcgcgttcgggggtgccgatgccgccgccggcgaccagcacgaggttgtcacaggcgcgcacttcggcgtaggtggcggcaagcaggtcgtccagcgcttcccagctgtggtggccgccggcttcaccgccctcgacctgaaccatgatggtggtgggggacacggccttggcgatgcgcacgacctggcgaatctggtccacggtgccgggcttgaaactcacgtacggcagaccgtccgcctgcagcgactcgatcagggccacggcttcgtccagctcggggatgccggcggagacgaccacgccgtcgatcggcgcgccggaagcacgcttcttgggcacgatgcgggaggagccgaactgcaggttccacaggtaacggtccatgaacatcgcgttgaattcgaccgtgcggccttcctccagctcgtcttcgagggcggcgatgtggcggtcgaacacttcggcggtcacctggccgccgccggcgagctcggcccagtagccggcgttggccgcggcggccacgatttccggttccacggtggtgggggtcatgccgggcagcagtaccggcggcttgccggtgagcttggagaacttggtgaccagcttggcgccggccggggtgttgatgacgcgcggggcgaatgccttccagttctgggtgcgctcaggctcgctttccagcgtggagagcgtggagcgctcggccagcgtggtggcttcgaccacgccgatgccggtgccttgcaccacattgccgatcagcttgccgagcgtgttgccggggccgaggtccacgatccacagctttgacgggtcggcggcgtcgaacagcgccttgacgcgggcgttccagtccacatggttcagaagcacttcctcggcaagcgcacgggtgcgcttctggtcgaagccgcaggcgccggcccaggccacggtctgctcgacggcttcggccatgagcggcgagtggaagggcagggtgacttcgaggtattcgaggggcgggttgaacacggtgccgccgtggagcttctgttcacgcagcttggcctggtgcttgtgctcgcgctcggcttcgagggcgagtgctgccaggtcttccgggtagccggaaagcacgtggtggttgtcggagttggtgacggcgatggagatcgggccgcgagcgttgttgacgcgggccaccagagcctcaacctgttcgcgggtggcgcccttgacggagagcatcggactggcttcgccatacttggggttcaggcccagttcgcgcacgcggcgagtgccggctgcaccgatcagggcggcgacggccagaatctcgtcgagggtcttgccggcggcctcgatggagccggcggcctcgatggcgcgggccatgtgcacggcgagcacgccctgggagtggccgag

SEQ ID NO: 3019 - DNA, 10812 bp, Unknown
  R19_24m  MAG No. k141_16560
aaccggaatcggccttgccgttatcggcggagtcggattttttgtcggaacctttatcggtatcagacttggcggcgcctacggcgatgatctggtcgatggccatcgtggtgacggtttcggatttcagcgtctccgattcggccacgccatcgacatacgtgacgttatacacctgggttttctcgccattgacgccttgctggcggatctccgactggccttcaggcagattggagtcgatgatggtttgtgtggagtatggcactatggctgtgcgtgtttcctcgccatgcgtcacgcgccgtacgcgcaggatagtggtatcgccgtccttttcgacgctcacacggtcctctttgttcagcacgatgcctttggagtcaagaatggaggccgcgggcagtttgccgttgggggccacggaagtcttgccgtccgcaatgacggtgaccgggccatcctgattgatgaccagtccgccggtgagctggttgtacacattgtcgatgtcgacggtgatttttgtggcgttgttctggttttcctcgaaaaatcccagcaactggtcggcactggtggccacggtccagaagggaacggacgtgccgtcgatgttgatagtggtctggtaggcggactgtacggtgaccacggcatgattggcgagttggtcgccggacgaggtagtgacgatatcgtgggtcttgatatccaccccttgttcctccagaagacgggtggccgtcatcgcatatgtggtgacttgggtggtttgcccgttgatgttcagggctacggatttacgcgaggtgaacgcgaatgatccagccagcgcgatactggtcgccgcgatacagacgattacgcggatgcgacgcagtgtaacaaaccgctgcggggtccaacgccgtgccattgccatactcttcctgctggatgaacgattacgccacccatcgtaacggttgttccggcccgtactgcggtttcaccggccaccgtcaccattcctgctcgtcagattgttctgagctcaaaaaaagaaaagaaaaagggggcgggagagaaggggatgttcccgcccccctgaaggcgcggagctggttgggggacgctccgccctcattccaggaagcccatagttgggggaaggctcctggagtacttacccaaggtaagaattatatgcgtagaaaagtctacgtatcatataatacgccacttttctacgcgtcgagcctcttgtcgggatcgaaccgacgacctgccgcttacaaggcggccgctctggccatctgagctaaagaggcgattgttcttaacgcgtaaatcgttttgaacaaatctctagtataccggtagttctcgagtggtcaattcaggccgagccgcgccggtaattaatcggccagcgaaatcggcttcttgttggcgccgatcgatggcatctggccttccacgcccacctgatcggagtccaagccgatggacttgaggaatccgtccaccatgctggtgtccgccagcgtgagctgcttcagatcccagtattcgccattgatggtgagcgtgggggaggagaacgcgccggagctgttgaacagttcggggcgtaggatcgtgtagttgttggaggcggtgagccacttgacgtattcgttcttaccactgaatgccgcggtggccacatcctcgctcacgccggcattgacggcctgcttctccagcttggcgttgcttaccggctcgtaattggacaattcgcccggctggaaatcctcagcgtagatgttggagaggtagctcatgaggtgatcgggattgtcatcatgctcggcaatgtagatggcaccgttgaacgcgcggttggagtagttgtcggagctcttgttgtcctggaaattgaggaagtgcaaatcgatgttgagctggccggcgttcatcagcttgacgagcgtcgggtcaagctggcggttcaccgaggcgcagccggggcacagcggctccatgtagatggaaacggtgggcgccccttcggccttctgaccgtaccccttgctcgagatcacgaagccggccttgtcatcggcgttggccggctgggtactgactttcttgagcttgctataggcctcgtccacggtcatgttgctttgctggctactgctgctggtgttggacggccgcatagccttgtatacggcgaatccagcgatggccaccagcaccacaataatggccaccacaatgcagccgatgatggtctgctgcttacgttccttagccgcctgctcggcccgtgcctgctgggcggcctcctcggccgctcggcgctcagcgcgtgtggcacgcttggcctgacgcttcggatctgacatagctatccccttgcaatcgcttcaatgtttgggccccatcataatgaccgggcctgaggaggactgcgcccagagctgatctgaggtgaattccctgtaaaagtgtgacggaacgaacgtatcggatacacaacggccatgtgtgcggatggctgatgtgtgagattccgccccgctctaggcgaacggcatccagttgatcggcatgcccagaatcggcatcgcgcacaaggccacggtgatgatggcccatatggtgaacagcacggtgccgcgcccgccgcccttgggcgccggcaccactggagcaggtggagccccacccacttcggtggatggcgcgcccgccgggcgactgtgtttgagcccgcgcagtacgccgccccccagccgaatcatcatcgactgtggggcgaacacagtgaccagccagccgatggccatgaaaccgcccagcgccagcccggaagcggagaacggcacatcattgagcaacggcaccggaataccccaatccgcggtgaaataccaggagatggtgtgaacgggcagtgccagagccgcggtggccacggcggttcccgccatatagatgatgactagcagcagtatgcggggaatggccagcagcagggctttgaccagatgccagggaaaagtcgccacgcgaatccacgaatcggagtttttgcgctcgccgccgcgtttgccctcgcgctcaagctggggttcggtgttataggccagggtgagcagtagccacaacaacgcagtggccgcgatgatggccacgagcggagcatttgccgccagtgccgccagcggcgccgccagcaggatcaatggcagggtgccgcgccgcagatattcccctcgcttcacgtccaccggattgggcatgggaggattttggaccatggtttcggtgggggccgcttgggcggtttggtcgatgatgcgctgcaatgccgggcgaatggcggggtccaccgctgtgggctggttgcttgcgggatcccagctgctctgggcggtgccggacggggggaatgatgacggctgcggcgtggggagtacggtggtgcgctcggccagcggcgtggtcggggccggagtcgaatcggtgttggtcattggtgtggtggcgccggccattggtgtggtttggtccggcatcggtgtggtcgcgccggtgagtacctgtgtgccggcgtcgtcggtgaaatcggcagcagcgtcgggcaacagttgcgtggcctgctccgcaccggccggcggacgtggcggcatatcggctaagggcagcgtggcggtagcggcgccagccggcgagaatacggcggtttcgccatcgccgttatcgcccttattgccggagaacacggccatggtgggagcctcagcggcttcctcggccgcgcgccagatggttcggggattattgcggtcaacgccgccggccgcgccaaaagggggcatcgcctccgcggcttcggcaacgatcgcagccggttgtccagccacggctcccgcggcgaacggtcccgcctgctcgccctgccaagcgttgggattcaacgcatccaaggcgatggcattcagcaattgatccggcgtgcaacgatccctgcgatccgggtccagtgcagaacggaaggcagccaatgtgccggccggtagtccggaaagattcgcgttgcccgaggcctcgcgctcaagtaccgccatcatcggcttggtgccgaacacaggcgcgccggttgcggcaaaagcgagcacggacgccaccgaccaccaatcggtggcgtcgtcggattcggcaccgtcaataatctcgggtgcgatgaatccgggtgtacccatcactaggccggtgcgggtcacgtgactttcgccctcgcccatcgcgataccgaaatcgaccaataccggtccggcggccgacaccatcacattggtgggtttgatgtcgcgatggacgatgccggccgcatgtacggctttggtggcttcgatgagcttgcgggccaagcgttccagatcgtcgcccacataccggccattggcggccacatcatccttaagattcttgccctcgatgagttcagtgacgatgaacgccaacgtatcgtcgagttccatatccacgatgccgcacacacccggatgattgaccttcttcaaggccatggcctcgcgccgcaggcgctcgcgcggcgtgacatcgggcttgaggttggggtcgtgcagggccgtggacgcagagccggagcctgccactgactcgtcggtcagggagtcgcgcagaatcttcatggcataggtggtgccgccgtcgtcgcgcacccgccacaccgaccccatagctcctgagccgagccgggagatcagcgtatacccaccaaccacttcgccgggctcaagattcaacgcgttcaaatcgctcatgccctccatcctaatgccttgccggtgcattattctggctctctcctgggaggccgagcttgatatttcttggctcccctctctgagaggagagccaagaataagtgccgtttacgtattgagaagtgccgtttacgccattaaggtcgattgccctgaccggatgtggtagcaaattatgcgctcgaaatgacaggataggtgcgtgggcaggtgcgccagtcgtgaatttgcgactctataaccatcggcatcaaggatgtgtcggcgatgacccaaaggtgagccagccgggcacattcaacagtggcacagcgatgcaagggcagtatcgtgagccgctgatcgaatcgataacgatatcagattcgaatgccgcgacttcgccggtcgtaccttcgaatacttctccgaagacggctacctgttcggcgtgatggcctcccagcaggtcgctggcgctcaggccaaggcctgaggtgtgtctccgataactgaatagctaaatagaatggacggcctgctgagtgctactcaacaggccgtccattgtgtatctgaatgcgaaaagtcattatatggaacggaatatatcgatactgtgcattgtgccgattactgattccgacgcaagtattcgcgcaggaagggcacggcaaaatcgacttcgcctcgttctgtttcgcggataacgaaggcgtcaaggaggcgtttgcggtaggtggcggcatagttaggcgttttgcccatgcgctgtgcaacattcacggtgggagagggaccatctgacgctgccatggcttcgagatactcacggtcgtttttggataagccttgcaactccgggatgcacacggcgttatcaaggtcaatacgtgcttcctcgatacctgccgtaacatcagcgtcgatgatggtatccgagtcccgcatgtctgcggcatcccagatatggtagccaaccagttgaatcatataggggtatccggctgtcacattggctgcagtgcttaattgagcgtcggtgatggacatgccggaggcgcggaatgttgtggcgaaagcatcgcgcacttcatcaagaggaatatctgtgagtatgttcgttttcgcgcgacgtaggaacgtgatgacttcgtcattgaacaaatcagaaatcatctgtgggagaccggcgaacacgatggcgatattgcgtcgttccctgatttgatgctgtatggcagtggcgatggcaatcatgtcggatcgctcagccgcttgagtctcatcaatggtgataagcaacccagcatggcgcttctcaagcgcatccaaccgtccggcaatggcacttctcaacgtttcgggcatacgcttcggggatagttcggcttctccgaggccgatgcccgctccagcaaaagtcaacgatggtcggatagcgaggtggtcaagggcccctcgcccggttcgtaaggcatcaacaaggcgttcgcatagtccggcagaggccgtttcttcgatgacatcccatctgcgcgctttggcccggtctccgaacacagtgagcatcacggtttttccggttccacgagcgccggtgacgagcataatgcgccctggggcaccgactccgttatcgagacctttctcgaaatcgcggataactttgcctcggccgatgagcaggggcggttcccctcctgccgttggcttgaatgggttttcctttgccttcatgtggaccgcctcctcgctgaatcaacctaaaataaaaattatcaaaaatatcaaaaaaataaaaattatcaaaagttgggttgagccgactgaagaaaacagccgtggcgacaatgattctgccgcaatccgcggtgacaacaactgacgcggaccttcttggcagaatcgttgtttgtcccgcttcgccaatcaacgtcgctcaagttcggtgcgcagaccggctaccgtagcggtcagctcacgcacttcctcgcgcaataggtcgatttcgggattggctgatgttgcaatagcctcttgcgcggcttccttggccacttccttctcccgagcgtcctcgcgccgatccgtctccagattgacctgatccacgatccacgaggccagcgtggccgtcacaataccgatcaacgcgatgccggtgaacatcagcaccaccgcaatgatcttgccttggaaggtgaccggcgagaagtcgccatatcccacggtggtcacggtcacgaacgcccaccacaacgccgtgccgaagtcggtgatcgtggatccggacgccccgcgctccacggaatacacggccagcgcgcccacgtacatgagcattcccaccgcgccgaccgcgtatacggtgatgcgcccgcgcaccgccatgccggaggtgcggttcagcacgtgcagcacggtcagcaaacgcaacagtcgcaagggccggagcatcggcagcgcgatggtcagcagcgtgaacaggttgtgcttgaaccaccgccagcgatcgtcggccaaccacagcgagaccacataatcgacgacgaacaccacccagatcacgttgatgacggtttcacacagcgcgatatgcgtgcgggagagaatttcccacgaatacaccaccagaaacaccacggacagcaccatcagcggccagtccgtccacttcttccacgtcttcagtcccatattccgattgtagtggcgcgtccgctgcgccactgcggagcatgactccggacatcagtgttgtatacgttcgtatacatttcacgttgtgtacgaacgtatacagcggtatttttcatctcgtatttcccttatgactatcaccacagtgatataatcaagaatatgtaaggagagagaaggagccggccaatggagaccgcatcgatcgaactgtggcatggctcttcgcatgtcatcaagcatcctgaatacgggctggtcaagccgaacaacgattatggccgcggattctattgcacgcgcagcgtcgagctggccaaggaatgggcgtgcgcgggactggatgacggtttcgcgaatcggtacacgttgaccacggacgggctcctcttcctggacctgtcccagccgccctacaccatcctgaactggctggccatgctggtcgaaaaccgtcgtttccagccgaccaccgccgtcgccgcgcaaggcatcgaatatctgaaacaagtgtttctgccggatgccagtcaggctgacgtcatcgtcggatgtcgtgccgacgattcgtatttctcgttcgcccgcgcttttgtcaataacgcgatttccgtcgaccaactcgctgaggcgatgcggttgggcgagctcggcaagcagatcgtactcgccagtcctcaggcattcgcggcactgcggttccaaggctgcgaaatcgcccgcgcttcgacctaccacggattgcgtaacgagcgcgaccgcacagctcgcgaagcctaccgccgcaaaagtgcagaagccgatctcgacggcctgttcatgcgcgacatcatccgcgagaaagtgaccaacgatgatccccgcctatgatgggacatacttgccggacgccatggccaacttggccggcgccttcgattatgcgctgaacgattgcgggttgccggtcggcctattcatggacttcttcgccacctccgaggcggccgcgcttttcgggcgaggcacgcccaaatacgtgtgtggcatgtccggcgaggagctggtggccgaagtcatgcggcaaaccggttgggcgcgcattctcgatatgccgccagccgcactgcgcgccggctcaacacccgaatactgggccggatgggtactcgcatactgccaatggaccaggggagtgcggttctcggacattctcgatgtgctgtcgctcgacgatatcgtgcgactgtacccgactctgcacgaagccgacgaaagccgattcgtcgacgtgtacgacgagcgggccgcccataatcgcaccgagggcgactcccggctgcacacgatccgcgtgcgcgccggactcagccaatccgggctggcccgccgctccggcgttaccctgcgctccatccaaatgtacgagcagcgccgcaaagaccttggcaaagctgccgtctccaccgtgctcgctttggcccgcacgcttggctgccgcatcgaagatctgttggagccgtaaagacgcggagtagtatcgcgccgcatcgattctgataactgaacaactacttttaaggcccggccggatgctcgtttggacatccggccgggccttctggctccacacggggtgccgaggtatccgttctccgcttcgaggggctgatttggccttccgtagaggtttactcccgtttcgaggggctggtggcccgctagaacacgggtataaacggcttcgccccaccgtcattccgccattttggggatgcgcttacttgagtaccagcccctcgaaacggagatagatctccggaaagggtcaaaacagcccctcgaaactcaagatggcggttgcagggcggttgaggatcagtcgaagagcggttcaaacgcaaatgtgaacaatgccacatgtgattgggcgggtcgctgcacgccgattttcggggggtgcatgggaatggcggaatatcaacgaaaaaccctatatctaggtttgttatgtgacacgcgccactacatatagtgccttgatttcaaatcacaccgctgtaatatggccttcgcttcactgttcatcagaaccacatcaaggggagtcgccatgaccgtcaccgtgttcaccaagccgcattgcccgcagtgcgatgccaccaagcgccagctcaccaagctgggtgtgccgtttgaaaccgtggacctgacgcagaacccctccacccttgagcagctgcaggccgccggtttccagcaggctccggtggtcatcacgccggacaactcctggaccggctaccgccccgacctgattcgcgaagtcgcccagcaggtggccgccgacaaccgcgccgccgccacggtgtccgcgtgagtctgagccagcccgaattcgcggccgaaggcaagacgatcggcgcattggtctacttctcgtcggcctccgaaaacaccgcacggttcgtggccggatgccgtttgcaggacgaaggcatcaacgtctaccgcatcccgttgcgggccgccgacccggcgctaaacgtccgcgaaccgtacgtcatcatggtgcccacctatggcggcggcgtggtcaagaaagcagtgccgattcaggtcaaacgcttcctcaacgatccagccaaccgcgagtggattcgcggcgtcatcgcctcaggcaacaccaatttcggtgaggcctactgtgccgccggagacatcatcgccgccaaatgcaaggtgccctacctctaccgttacgaactcatgggcaccccggaagacactgccgccgtgcgaaacggcctcgtccgcttcttcaccgaacagtaaatcttgaccccctcgaggtattggctcccctctccgaggggagctgtcaacgaagttgactgaggggagcaactgtctgagtaaacacacttctgccatattccaaggatttccaatgactgacctcaccgccaccggcctgccgctcgacaatactgccgacaccgcagcggaacagtacgacccggcgcacgattaccacgcgctcaacgcgatgctcaacctctatgacgccgacggcaagatccagttcgacaaagacaaggccgccgaacgcgaatacgtgacagggcacgtggccaccaacagcaagcggttcgcctccaccgccgagcgtctcgaatacctgatcagcaaccagtactacaaccctgcggtcttcaaccagtactccgctgaattcctcgaccgcatctacgagcacgtggaatccgccggctttgagttcggcactttccttggtgcgttcaagttctacacgtcc

SEQ ID NO: 3020 - DNA, 8100 bp, Unknown
  R19_24m  MAG No. k141_16922
ccaagctgcccgcccttggcctgtgccttggtctgcagtccatggtcatcgaatactcccgccacgtgctgggcattgaagacgcgaactcttccgagttcgagcccgattgcgccaacccggtgatcgccaccatggaagagcagaaggacatcgtggccggcaagggcgacatgggccacaccatgcgtcttggatcctacccggctgagctggaggaaggctcgctggtcgccgaactgtacggcaccacgcatgtcaccgagcgccaccgccaccgttacgaagtcaacgtggcctacaaggatcgtctgcgtgaaggcggcctgcgcatctccggccagagcccggacggcgagctcaccgagttcgtggaactgccgcaggacgtgcacccgttctatgtggccacccaggctcacccggagttcaagtctcgcccgaccaagccgcacccgctgttcgccggtctggtcaaggccgcgctcggccatcaggcggcccgctgaccgtggatcccgcgcggtcggtccgcgcacgatgaaggcgtgacggcacggcatctcaggatgcttcgccgccacgccttcgccgtttggtgccatccgtgatgccgcatggcccgatggcgcccgcatgtaatcaagcccacagccaatatgcgtcagggcagctagtgtttgcacttgggttctgctaggttttcatagggttaagtgtgatacaaggaaggcaggatggtgaccgaaaacacagcaccaaacgccgccgctgacgtggagatgagccagtatgtggctgatcgtacccgcgtcaacgaggacaagatcaagaaggatgacgagatcatcagccagttcggcgactacaactatggttggcatgattctgatgccgccggcgaagccgcaaaacgaggcattgatgagaacgtcgtacgcgcgatcagcgccgacaaaggcgagccgcagtggatgctcgacatgcgtctgcgtggattcaaggcgttcctcgaaaagcccatgcccgattggggtgtggatctttccggcttcaacgccgacgacttcaagtactacgtcaagccgatcgagaagcaggcgaagtcgtgggaggagctgccggacgacatccgcaacacctacgatcgccttggcatcccggaggcggagaagaaccgcctcgtctccggcgtggctgcccagtacgagtccgaggtgatctacaactccattcgtgaggacctgaagaagcagggtgtgatcttcgtcgacacggacaccgctgtgcgcgaataccctgaactcgtcaagaagtacttcggcaccgtcgtgcccccggaggacaacaagttcggcgccctcaacaccgcggcgtggtccggcggctcgttcgtatacgtgccgaagggcgtgcacgtggacatcccgttgcaggcatacttccgcatcaacaccccggccatgggtcagttcgaacgcacactgatcatcgcggacgaaggctcctacgtgcactacgtggaaggctgcaccgccccgatctggtccgaggactcgctgcacgccgccatcgtcgagatcatcgtcgagaagcatgcccgcgtgcgctacaccaccgtgcagaactggtcgaacaacgtctacaacctcgtcacccagcgtgcctacgtgcgtgagggcggcacgatggagtgggtggacggcaacatcggttccaaggccaccatgaagtacccggcctgcatcctcgccgaaccgtacgccaaggcatccaccatgtccctcggcttcgccggcaagggccagtaccaggacacgggcgcgaagatgattcacctcgccccgcacaccagctccaccatcgtcgccaagtccatctcgcgcggcggcggccgctccgcctaccgcggtctggtcaaaatcgtcaagggcgcgtacggttcgtccaactcgaccgtgtgcgatgccctgctggtcgacgacttctcccgctccgatacctacccgcacgtcgacgttcgcgaagacgacgtttcgatggcccacgaagccaccgtttccaagatctccgaagaccagctcttctacctgatgagccgaggactcacggaggaagaggcgcgaggcatgatcgtgcgcggcttcgtcgaaccgatcagccgcgagctgccgatggaatacgcgcttgaactcaacagacttgtggaacttcagatggaaggatcggtgggctgattccgatgaccgacaacacaacacccgtcaaggaaatcaagattccggtcgccgaccccaacgacccgtacgcgattccggccgccatgccgtcctccgtggaccatgccgtgcgttcgttcaacgcaggcgactacccggagcccagccgcaagcaggacgaatggcgctacacgcctatcgagcgcatcaacgagttcttcaccgtgttcaagccttccggcgaaacgcagatcgaagtctccatgattgacggctcgccgttggccgaaggcgtgaagctcagccagatcaagctcggtgagggcctgtccggcactgtgtccaagcccaacgaccgcgtctccgcagtcgaatgggaatccggccacaccgcaaccattctggaactgtccggtgagatcgcccagcccgtgctcgtcaaggtgcacggcgcgggggaggacctcgacgctttccatctggtgatcgccgccgccgacaaggctcatgcggacgtcgtcgtggaacacgacggtgacgcacgactggccgaaggcgtggaaatcaccaccggcaaggactcgcacgtctccaccacgttcgttcaggaatgggccaaaaccgccaagcatgtggccaaccaccgcatccacgtcggcgaaggcgcatccctgcgccactccgtcgtgaccttgggcggcgacatcgtccgcatccgcatggatcaggacttcggcggcgaacaaggcgacctcaacatgctcggcatctacttcgtggaccccggcgagcacatcgaacaccgcacgatggtggtacacaaccaccccgactgcaagtcccgcgtggtctacaagggcgcgcttgacggcaagggcgcgcactccacttgggtgggcaacgcgctcatccagcccaccgcccccggcaccgactcctacgagctcaaccgcaacctggtcctgaccccgggtgccatcgccgattccgagccgaacctcgaaatcgaaaacggcaacatcatcggtgccggtcacgcctcttcggtgggccgcttcgacgacgaggaactgttctacctcgaatcccgcggcatccccgaaaccgacgcccgcaagctcgtggtgcgcggcttcttcggcgaactcgtcgaggagatcggcattcctgccatctccgaacatctgatgaccgtgattgaccgccgactggcccgtggcgaaaacgacgccatggcacaggtcctcgaagacaagtaagaacagcatttttaggagcacaacaatgtcaacactcgaaatcaaggacctgcacgtccacgtcgaaaccaaggaaggcatcaagccgatcctgaagggtgccaccctgaccgtccactccggcgaaacccacgccatcatgggccccaacggttccggcaagtccactctcgcctacacgttggccggccaccccaagtacgtggtcgactccggcgaggccctcctcgacggcaaggacatcctcaagatgactccggacgagcgcgccaaggccggcctgttccttgccatgcaatacccggtcgaagtaccgggcgtgtccatgaccaacttcttgcgcaccgccaagaccgaaatcgacggcgaggctcccggtattcgccagtgggccaaggacctgtccgcagccatgaagcgcctcaagatggacccgaagttcgcctcccgttccgtgaacgaaggcttctccggcggtgaaaagaagcgcgccgaagtgctgcagctcgaactgctgaagccgaagttcgccatccttgacgaaaccgactccggcttggatgtggacgccctgcgcatcgtgtccgaaggcgtgaaccgtgccaaggaagccaaccagttcggcatcctcatggtcacgcactacacccgtatcttgaagtacatcaagccggacatcgtgcacgtgttcgccgacggccacttcgtcaagaccggcggccctgagctggccgacgaactcgaagagaacggctacgaccagtacctgcccgaaggcgccgactccgagtccgcgctggcctgagtccgtgaccgtgggagtctgacatgccctattctcgacacgctccgggccactcaggccaagtctttacggtcgcgaacaggccatgtcagactcccactcgtttcgtacaattgttacgtaagtaggggaacataatggttgattttaaggagattcggggcgagttcccgattctgaatcaggagattcacgggcacccgctcgtgtacctggattctgcggccacctcgcagaagccgaatgcggtgatcgacgccgaggcgaacttctaccgtacgatcaacgccggcgtgcaccgcggtgcccacgagctggcggcccgtagtaccatggctttcgaagaggcccgtgccaaggtcgccaagctggtcggcgcgaatgcagcggaaggcgaagaagagatcgtcgtcaccggtggtgccacggccggactgaacctgctcgccaccgcattcggcaatgcgtcgctgggccgtgggggagaagccgccaagcgttttgccctgaagccgggcgatgagatcgtcgtctcgcgtgcggaacatcattcagtgctgctgccattccaggagctggcctaccgtaccggtgccaccttcaagtggatcgacctgaccgaggacggccgtgtgcgtacggacaacctcgacgaagtcatcaccgaacgcaccaaggtcgtggccgtcacccacgtgggcaacaccacgggtgccatcaccaacatcgcccctatcatcaagcgtgcgcatgaagtaggttcgatcttcatcttggacgcttgccagtccgtaccgcacctcaaggtcgatttccacgcgcttgatgtggacttcgccgcctggagcgcgcacaagatgtacggtcctaccggcgtcggtttcctgtacggtaagcgcgaactgctcgaagccctgccgccggccaacttcggcggctccatggtcgaactcgcctacatggaccacgaggcccaatacatggcccctccggcccgcttcgaggccggcacccagccggtcgcccaagtggtggccgcaggcgtcgccgccgaatggatgatgaacatcgggctcgagaacatcgaggcccatgagaagaccatcgccgccgaactgctgaagctcggcgacatcgatggcattcgcatcctcggaccgcgcgaaaacgtggaccgcatcggtaccgtggcgttcgacgtggccggcgtgcacccgcacgatgtgggccagttcatcgacgcccagggcatcgcgattcgcgtgggacaccactgcgcccagccggtgcaccgccacttcggcctatacgcatccaaccgtgcctcctccggtgtctacaattcggtcgaagatgcccaagcattggtcgaagcggccaagggcatccgtaagttctttggagtggagtaaaacagaacaccatgaacgaattcggtatgagcggggatgacctcgaacagatgtaccaagaggtcatcctcgaggcgtcaaaacatccgcatggcaaggaatcctttgcgcccaacgcggcggtcgaacagtccgcggacgcggcggccaatgtcaccgtgcaagccagccacgaatactgcacgcccggtgaatcgcaccagttcaacccgacctgcggcgacgaggcgaccatccatgtcgaagtctccgatgacgaaccgcacaccatcaagcgattggtgtgggacggccacggctgctccatttcgcaggccagcctgtcggtgatggtcgatctggtggacggcaaaaccgtggacgaggccatggatctggaacagacattccacaaactgatggaatcgcgcggtgccggtctggacgacgagaacctggaagaaaagctcggcgacgccgtggtattccaaggcgtgtcgaaataccctatgcgcatcaaatgcgctctgctaggctgggaagggctgaaggactccatcgccaaagccctcgctgcaaagaactgaggaaatatgtccaacgataatttggttcccgaaccacagccgtccgttttcgatgccgtcaacggcgtcctgcaggacgaggaggccgctcgccgcgtgatggccaacccggccttggccaagggcttcccgaacggacgcccgatcgagcactctgctgcgtccggcgatgacacctgtgcgtgtggcggtcaccatggcaaatgcggttgccgggatgacgaacagtccgatggcagcgagattccgatcaaggcgattgacgatatcggccgcgccactgccgaagacgtgcgcgaggcactgcatcaggtgattgatccggagcttggcatcgacgtgatcgatttgggtctggtctacggcattgagatcgatgagctaggccgcgccattattacgatgacgctgaccacgccggcctgcccgctgaccgaccttatcgaggacgaatgcgcatccacgctggccggtctggtcgaggagttccgcatcgactggacgtgggacccgcgctggaccatggagcgcatcacgcccgaaggccgcgaccagctcgccgcccttggcttcaacttcgacaacatgccaaagtactgatagcgcttagtaagctccctctgatgagggagctctatacgagaaaagccccgcatgatgcggggcttttccaagtctggactggtcaatcagtcatcgacgatggtgttcttcgggacaaccgtaatgccgtccggcgtgacggtgaagccacgggccagatcgtgctcggtatcgatgccgacagtggagttttcggtcaggaccacgttcttgtcgagaatcgccttgtacacgcgggcgcggcggttgatgatcacaccgtcgaacagcacggaatcgacgatctgtgcccacgagtggatacgcacattgggggagagcacggagtggtgcacttcaccgccggagacgatcacaccgggggagacgatcgaatcggtggcgtggcccagacggtcgcggccggcgtgcacgaacttggccggcggcaggttgccggacatcgtgtaaatcggccaatcctggttgtacaggttgaactcgggcacataggcgatcagatccatgtgcgcatcgtagaactgcttaatcgtaccgacgtcgcgccagtaagcgtgatcagtgaccgtggaacccggaatctcgttcgagttgaagtcgtagacgccggcctcgttgcgggaagcgaagtacggggcgatgtcgccgcccatgtcatgcttggtgtcggcagccttctcatcgagagccagagcctcgaacagggccttggtgttggcaacgtagttacccatggaagccagaatctggttcggattgtccggcagaccggtggtggtggccggcttctcctggaagttcctgatcatgttcgggtgatcgggatcgacctcaattacaccgaactggttcgattcctcgatgggctggcggataccggccacggtgaactcggcgccggactcgatgtgctgctgtaccatctgctcgaagtccatgcggtagacgtgatcggcgcccacgatcaccacgatgtccggctggacgtcctcgatgatgttgatggtctggtagatggcgtcggcggagccgaggtaccagtgcttgccgagacgctgctgcgcgggcacaggggagacgtacgagccaagcagcggggagaaacgccagacctgggagatgtggcggtcaagcgagtgagacttgtactgggtgagcaccacgacctgacggtacccggagttcaccagattgctcaacgggaaatcgatcagacgatacacaccaccgaaggga

SEQ ID NO: 3021 - DNA, 5171 bp, Unknown
  R19_24m  MAG No. k141_17016
gcccttcagggccaaagtcttggacttcttcggctttgcctgacgtcccttacggacgagctgttcaatagtaggcaacttgaattctccgattcagtggtttctcttgcttttgtgtgaccgccgcactgcgcccacactgttcagcacactcgcttggcatctgcctgttggcgacacccgacgaatcggaaaagatagcccagtccaccggcccgatggccttcgcccctcccgtcggcgcatgactacgtgcgatcagcggtttgaaggatatcccagcatgctcgcctgttacataaggcgtgctgctggcacacacgaatatctatactacgattccgccggacaacgacgcgccgggcctcgactcactagcttgggacaatccgcgccctgtacttctcccctcctcccaacgcaacattcccgggaatgcgtcgcacaacacacgcacacacgccctcccaacgcaatattcccgggaatgcgtcgcaaaaaagcgaacgccacacagcaggtgcccccgcggagactatgtcacacgggggcaccgccaaggaggttacattatgtttcttttcaccacatgccgcttctgtgttatctgtttccagcacatcctcgtgctcttccatatccgatgggaacctctagcgacccggcctctttgccgtatcaccttgccgctttctgcattactaattatagcaaaaccgccctcgcgaaacgcccgatacatcaatcgggagtaagcgggagcggctatgttatgcggggtaggaaaagtggatgaccgactgactgaagtcgtgccttacccggcctttctcaccatctcaggatttcaggcagcgaccttggcggccttgtcggcgtcgaacgggtgggccacggaaacggtgctcttggcggagcccttctcgccgttgtcagaatcccaatgaatctcgtgccggtcgtcatggttgcgccaccagctggacaggatggagccggagatgttgtgccacacggagaagaacgtggacggcacggcggcgagcgggttggacgcgaaggaggtcagggccagcgtggcgcccagggcggagtcctgcatgccgacctcgaacgtgatggccttctgctgcgcgtagcggaagcccttcgggtagatcctgtacatcagcttcgagaagccgaagcccagcgagtagccgcacagattatgcaggatgaccaccgggatggccatcagggagctggccacgaacagcttcggaccgttggcggcgacgaccacaccgatgatcagcaggatggccacctgggagacgatcggcagggcgaccgtgaccttctcgatcttcttgccgaagaccatgtggcagatcacaccgagggcaatcgggaagagcaccaccttgacggcgttaaggaacagggattcgaccggcacgctcacatactgggaggccagcagctgcatcagcagcggaatcatgaacggggcgcacagggtggagaggatgccgatggagacatcgagggccacatcaccacgggacaggtagctcatcacgttggaggaggtgccggacgggcagcagccgacgagaatcacgcccacggccagcgggccggacaggtggaagatcgcgcacagggccacggcgacgagcggcatgatgacgaagtgggccaccgtgccgacgatgaccatcatcggctgggtgaggatgcgcttgaaatcgtccagcgtcagggtcagccccatgccgaacagcacgatgcccagcatgtagccggtgtacgccttgccccacaggctggcggccggcacgaagtagttgaagacggcccagacgatgacgatgaccgtaaaccacttggtcagccaatctgcaaaggctttaaccttttccatggtgtttctcttcccttgttcggtgtaggtaacatcgcatgaaactaggcgggtcgcggttgatatgaaacataatgctcacattgtgaacgctcacgtaatcatctctgcaatccccagtcgcaccatcacgccgttgtgtgccctgacttttcatcaatcgtcacacaagacccactcgtccacatcccaccatttgagacagcccacagcctagccccaagaatgaaaccaaccacttgattccatcgcgacacaccgatgagcacacatccgcaaagttgtgtatagtattcacctgttgtgcgaattcagcttgctgaatacgacactatggtggccatagctcagttggtagagcatctgattgtggttcagaaggtcgcgcgttcgagccgcgttggccaccccagtaaaacccttccgttcgcggaagggttttgtttttctccatgaattccccgctcctgccgggaaccgccacgttgtacactcgggcatatccaattcatctaacacaaggacaaaaggtccgtcatgctgtcttttgagaacgattactcccgcgccgcccatcccgcagtgcttgaagccgtggctgaagccaacaaccatctgtattcgggctacgggtccgacgaactgagcgatcaggccaaggccaagatccgcgaggcctgcggccagccggacgcggatgtgtggttcctcgtcggcggcacgcagaccaaccaggtcgtcatcgacaccatcactccggcgtatgcaggcgtggtcgcggtcgcctccggccatccgaacgtgcacgaggccggcgccatcgagttctccggccacaaggtgcttacgattccccaacacaacggcaaaatggatccaaccgaactggacgagttctgcaagaccttctatgcggacggcaactacgagcacatggtgttccctggatccgtgtacgtctcgcaaagcaccgaatacggcaccatctactccaaagccgaactgcaggccatcgccgatgtggcgcataagtacgatatgccgctgttcgtggatggcgcgcgactcggctacgcgctgaccgccaccggttccgacatgacgctcacggatctggcgaccatcgccgacgtgttctacatcggcggtaccaaggtgggtgcgctgttcggcgaggccgtggtgtttaccaagcacaacacgccgaagcacttcctgacccgcatcaagcagcacggcgccttgctggccaagggcttcgtgctgggcgcgcagtttgacgccttattcaccgacaacctgtatttcaagattgcccgcagcgccaatgaggcggccgatcgtattcgcgaggccctgcgcgccaagggctacatgctcactttcgaagcgcccaccaaccagattttcgtgacgatggatcagccgaccatcgaccgtctggagcgcgaggtcaagctcggcttcaccgagaaggccgacgacacgcataccgtgatgcgcatctgcaccagctgggccaccacgcctgaagaggtcgatcagcttattgaggtgttgtaaaacccttcgctaatctctccctccgtcatcgcttcgcgatgccacctccctcaccagagggaggttttttcgtagctcccgccgatgagggagctggccgccgcaggcggactgagggaaaacctctccgcaaacgagaaggctcctactcccccatcgccttgcgttccatatccacgaacttgtggaccgaggcttccacggaataatgcgccttggtgtattcggcgtatttctcgccccattcggcgcgctcggcctgatgtgcgatccaccaatcgatgcgtcgggccagcagggccgcgtcccgcacggggaacaacgactcgtcgatcagcgcgaactggccggccgccgacagttcggacgcggcgatcaccggtaccaatccgcacgccatcgcctcgatcacgctcaccgattcgatgtcggcaatcgaacaatgcacgaacaaatcgcccgaacgcaacaaatcgggcatatcggcgtgcttgtggaatccgatatcggccttgcgcgccagcaaacgcccggcgcggaacttgagatactgcttgagcggccccgtgccggcgatcaccagctgaatatcgccggcgtgccgggacatcgacaccgccttgatcagcgtaatctgatctttctcgctggccagtcggccggaagcgatgacgcggaacggcacgggagccgaggcatccggatcggccggcttcttcggcgaatacaccggtgaataaccattggaaatcacgtgcaacttggctttatacccgtgcgcgcgcaacaggctcgcggtcatttcggtgggcacatggatgtggtcaatgtgcttgtacagccagtgcttgaacagccagtacaggaagctggaaataccgggaatgcgacgtagcgggccggccgaatacagcacgttctccggctgcaggtggaatccggcagtcacgggaatgcccatttggtgggcgactttagcggcacgacggccgaatttgaacggcatatagatatgcaccacatccacgccttggaaggcggtgcggaacaacgtgtcgctgggttcggcgaattgcatgagctgcttggcggccacccacgagacgagcggcaccttattcacgcgcgccggatattcgggcgcccctataccgacaagcctcacatgatggccttgccgctccaattccgcagcccattgcaaggccgaattggaggtgccgttgccctgattgcccaccgtatcgaccacaagagcgatagtcagcggacgatcaatgctctcttcaatcccgttttcgcgcattgcctcatcctaaaccaccgcgaggcaatggcgtcggccgcgctgcttggataggccggaaatggtatgggctgccgcattttgcctaatattgaatcacgcgcttcgcagcgcacgatcggcgcgggccacggcctggaacaactcggcggtgtgcttgagcagactgatgcgcacccagccttcgcccgcctgaccgaagcagatccccggcatcagcgccacgccggccgtgttgagcagccaatccacgaatgcggcggaatcgccatgccaccgcgccagccggccaccatatacattttggacagcgagccaagttccagcgccacgtccagcgcgcccggagtctccagcaggctcagcgagcgtacgtcaccgaattcgagcccc

SEQ ID NO: 3022 - DNA, 3327 bp, Unknown
  R19_24m  MAG No. k141_17088
aaccaccctcagtcggcttcgccgacagctcccgccagcgggagcaggtaaggagacatcatgtggaccacatttttggtcgcattgaaagcgaacctgcgcaatcgtcaggcactgttctggatgattgtgtttccgatcgtgctggcaaccatgttcaacgggttcttcggcggactgtccgagggatacgagctcaaaccggtgccaatggccgtcgtcgaagatagccgctggcagcaggcggacggagcgcgtacgtttgtggatgccttgtctggagagacggcctcatcgtcggagtctttggacggcacggcatacgccgatatcaatcagcaattgctgaccatcaccgcagccgacaccgtgcggaaagccgaacagctgctcgccgatggcacagtccgcggctacctggctgctgacggcaacgggcgtttggcgataaccatcagtcgggaaacggtgaccgcggccaatgacaccacaggaagcgtcggactggatatcagcctatcggcattgcgcagcgccatcgacctgtacaaccgcaccgacgccgtcacccgacaaaccatcgccgacaatccacaggctgcgctcagccgcaacttctggaatagcatcgggcaaagcgtcgatgtgactcacgaaacaacgctcacgcatttccagcccaatgccatcgccagatactattacgcgttgctggccatgtcctgcatgattgccatggggtactcaatcagcacggtctccacagcacaagccaacctgtccgcattgggcattcgccgcaccgtggcgccattgagccatgccagacagcttattgccggtttccttgcctgctggttgtgcgcatcggtcgcattgcttatcgcattggcctatattcgcttcatttgcgacatttcgtttggagggcgagaaccggtgacggtggtcgcggtaatcatcgccgcattcatgaccagttcagccggtactttgctcggcgcggtaccgaagctttcctacgacacgaaatacggtttgtcgagcggaatcgcctgcacattgtcgctgttcaccggactgtacggcagcttcgccatgcagatcagtgactggatagcacgcaacgcgcccatcctcggcaccatcaaccccgcgcaacaggtgacgaacctgttttacgacattttgtactacgacagctaccagccgttcatcaccacttgtgccattttgctggcgatgagcgcggtattcctcttggccggcatcgcaatgctgaggaggcaacgctatgaacacctgtaaagccacattgcgtgtactgttctcgcacagggcctacctgttgatttacctcgtgttcgtgggcatcatgatgctgtctatcagctggtcgatgctgtctggcacatccgattccgcagccgcggcattcgagccggccaaaatgcgtgtcgccgtcatcgatcgagactcggacaggggcggcatcgcgtcatcgatgcgcacatacctgtcggattccagcgaactggtgaacgttgacgatgctagtgaaactctgcaacaagccgtcgcctcgaactgggtggatctgatcgtcatcatccccgatggtttcgccgacgatttcattgatgccgcggcgacaggcgagaatccaccaagcgtggacacggtcaccagctatacgtccggcgcaggctcgatggcccggatgaacgtcatcgggttcctttcactcacacgtacggcactgattggctcgcatacgacggtcgatagtgcggcgctcgcagctatggccggtatcgacattggagacactgcgggtgattcgtctgaagatggcatgggcgggtttggtgaattctcgaatcaggacatgcttgatatgctgccggccggtcagattgagaaacccagcgtcggcgatctgttcgaggcatcgaaagcggctgccgcatcggcgagtgacatggacgcgaaccataaggtcgctgtgatcgacacggcaagcgcggacgcggaaagtgcttcggacatggcggccagcagatttggcaacaccatgaaaaccgcgctgtatccgctgtttttggcgatgaccgtctgcgggtcaatgattctgggcatattcaccaccggggaagttcgccgtcgtctcaccgcatccccacaacacatgtcgtcgatgggactccagcggttgctgacgctcagcggattcgcgctcgtcgtatgcgtcggttatctggtgctggcggtcggtctgatggtcgcggcaggacttgatccgttgacattgagcgccgaaggagtgctgatgacgttctgcgcaacctgcgtatatgcgctgatgaccgtcgcctgtggattcatgctcagcgaattcgggttttcggaggcggctgccaacggattcgccaatatcttcggcctgctcatcatgttcacgtcgggagttgcattgccgattgacatgatgcccgccgtgatggtgaccatagccaagttcctgcctggctggtggtattgccgagcaatcgacaacgcgctcggcttcggcacggctgcggagagcggcgtgagcgtcgccggctgggccggctcgctgggattggtcgcactgttcggcgtgatgttcatctgcattggcctggccgccggccgcttccgccgatcccgtcccaccttggccgcgcctgccaccacgcagctggccgagtgagaaaatcagcctttcaaccgataccgctgcaccgggtcatcggcgaacttgactcgggcaacccgcccttccttcatcagctcgcgcatgccggacgtggcggccagcggagtcaactgcagttcgcgcatgatctccttgacgctcatcgccgaatgccgttccagtacggtcataatcgccttgaccacgtcacccggcgaactgttcgccatcgtgcgctgcttggtgatggtcatcgtgaacgtgttgatgtcgttgcgcgtggtcgccggctcgatgccggcctcgcgcaatgcggcggcgatgcgctggtagccgtcgccgccttctgggttcacaaacccgccgcccggatacggcgtggactccagcagcgtgaacaggaactggtttcgggtggagacgaacggtgcacccgtcaccggatgcggactcgccagcacatcatgtgtcaccatgccatacagaccacccggattggtgatctcgatgcgatcggtgaacacgctgatatgcacctgcgtgccgcgcgcatcgggcgaataatcacggtgggtgagcgcgttcgcaatcgcctcgcgcaacacgag

SEQ ID NO: 3023 - DNA, 14140 bp, Unknown
  R19_24m  MAG No. k141_17126
cggcccgaacccgcacgggcaccgggacctccccgcatacccatgagacccacgcccgggaccattcccggccagccccgacggcgaggtcgaacggcgcggcgcgtccgcgaccgtgggagcccgacgcccaggccccccggtccgccgcgcagacagctcccctccagaggggagccagaaactggcttggttatggggtcgctctacactggcttctgctatgcattacttcacccctaaacgttgcgccacgtcgaataaaatcatgtaccacgataaggcgcaggctcagcgtgccgctgatcaaagcctgatcgagcgtggagccgagctatgggtgtaccgttgcgaatattgcggatgctggcacctcacacatcgcgatccacaatccagttaccggcatgtaccgctgaaccagcaactcaagccacacagtcgtaaaaagggctacaagccacgtagacgttagcgtcagaagctccacaggcctcgccaacgccgtatctgaggcaggttacggtccaaacacgccaggtcgtaggctgctaagcgttcagggcgctcggacacactccgtccaacactcacatcaccttggtgctttcaaggttgcggataacccaatcgttgaagcgaattaccggcttgcgcaacataagtcccaacagcaatgagggaacaaggaacagtgccagtttgcccatggaaacccagtattccatgccgaatgagcccgccatggccgaatgcatcgcatccaccgcataggggaacagtagccatttagaaacgacctggaagaacgtcggcagtgtttcaatggggaatgtgccgccggaaccggctacctgcataaccagcagtactacggcaatggctttgccgatatcaccgaacgatagggccagcgtatacacaatattcgagaacaccagtgcagacaaccacccgaccatcaaaaactgaatcggatgctcacactgcacgccgagatagaacatatcgcccaggcacaccagcgtaccttgcagcaaagcaaggaaaccgaaaatcatgtatcggccgaaatattcgtggtgcaagcgtaaaccgaactgccgcgcattgccggaagactcggcacgcggcttcttcagcacatccaacgcggcggccggtccggcaatccgcccggcaatcatggcctcgcgaagacccactcccgaaccgagcggcagatcattgcccaaccctaagatacgggccttctcatggtcggaaatcgatactttcaacatggcgaccagaatgatcgcaccgacccagatagacagaatcgtgtagaacggagccatcgcggaaccatagttggcaacgggatagagcgcgatgcggtcgaccgctacgggtgccgccagcatggaagcaatggcatcgggcttcgcagaggaaatcacagacaggtcgttggtgccgccactggtgatagaggcgagttgggaagacaagttgtcgagtttcttcgccgaacgggtcaaagcgctagctgcgtcagtcaaggccgactggatatccgtcaggctgtctgaaacgccgccagaaagacctgacacgctgctgacggtcgacgcaagcccgtcgattacggaacttgcctgcgtggccacttcgtccatggacgaggtcagattgttcagttgcggtttcagcgtgctcttgtacgtgtctgaagcctgagtaatcgattgtttggcggcggcgatttgtgatttcagatctcgacgcgctgtatcggcatcggcagtaccatttgctatgtgcgtggccgcatcgcccaacgcggtggcggcttgctgcatgctctgctgcgcctttgtggcttggtctgcagccgcgttcagttgagcggcaacggtatctccgcccacgggcagtgaagccgcttgtttggcgagatctcgtaaagcggcggcatactttccaaagctgtcggcctgagcctccactttggattgcatatcggtcagcttgtttgatatctgcgaggattgtgagcccacatcggcaaaagcggcatcgatctgcttggcaatggtgtcgtaggatgaaccggcctgctgcaatgccgtaccgacgccatcggtggctccggacaatgccttgtcgaggctggagacgccgttgcgggtctgtttcaacgcctttttggttgtggccgcagctgagcctgttgatcccagcagcttatcggtggaatcaatgatactgttggcggccccgagcagattggcataggaatccatctgcgacgcagtgccggtcaaacgagatgacatggtggcaatatgactggaggcgttgttgacgtactgctccatttgcgggctttgcgcgtaatcggccacgttggaaaccaaatccagcgccacgctcgccaaggtcttcacaaatgtctggtcgatggtcgtggccacggtggtagcaccctggtcggtgatatgcggagcgatcggattgattttctcattgagatagtattcgagcttggcgtgcttgatcttcggtgaaaacagcgtcatcatatcggagctgaagctctttggaataatcagcgcggcatagtattcgcctgagttcacgccatcgatggccttagcacgatccacaaactgccagtcaaggtcatgattggccctgagcgtattggtcacggtttcgccgacgttgatggtgatcggcatcagatcggacttatagcccttatccacgtttgccacggcgaccttcaaggccttggtgttgccgtacgggtcccagctggcggcgatgttgtaccaggcgtacagtgccggcacaatcaccaatcccatagccacgattacggcgatcacattgcgggtggcttggcgcacgtcacgtacgaatattttccagataagcttcatcgtgcgcctccttgcccagactgaccggactgctcgaactgtgcggtgtgcgcagtcggctcggcggcctgatcgccgaacagtgtgagtcgttcagtggtttcgccgatatccggattgctgcccatcgccgcttcgtgacgtccgtggccgtggaaacgccgccacacatatccgttgagcatcacattgcggaactcgtcggcactcatggcactgacgccaagctgcatggcgtaggtttcgcgtgcgtattcaaccacaatgagataggcgtcgataagaataatcgacagaatccaggaggtcagcatggcgattttctcttgggtgacgaacagcagtaccaggaatacgaacgggagtacggtcagcaatgtcagaccggcaacgatcatctttgggtaccgcgcgaagaaccggtgcgcgcgatgagcgatgatatcgcgcagttccttgctgtcggacaccgtgcggaatacggagttcaagctcacctgttcgttcaccatgctgttgtgctcggtgatcatcaggtcggtatctcccaaacgatggtcgaacagcgcgttcaggttcatcgcataccggcgtacgacaagtcccacgaaaagcgccgccggcagataccagaacaggtgcagcatgtcgagccagtaatggttcgcgtacaggccggcgatcgggccgcgcatcgcgttgatgccgtaggtaaagggcagccatgggtgcagttcgcggaagaagttcggcatcatttcaatcggatacaggccggaggcaccgggtatctgcacaatgaccagaattacggcgatggctttgccgatatggcggaacgccacggccagcgcgtaaataatgttgatgtagacgaacgaacagaagattccggccaagatgaacagcagcggatgctcgcattggatgccgagcaccagatcgccaatggtggcgatgatggcttgcaggaatccgatggtgaccagcagcagccagcggccaagatatgcttgcgtagcggtgatacggcgaatgcctttgcggtcgacctcaagcttgtagatggcaatcagcacgaaaccgcctacccacagtgccagattcgtgtagaacggggtgactgcggacccgtaattgtcggtggcgtacacgactttcgtggtcagggtgacgggattgcccatgaactcgccgaatcccttgtcatccagatgcagcgtatcccggattttctggtaagcggcggaactatcgagcgtggcgatatcggtgcgtacggtgacgacatcgctggccgcctggcgcagcgaatcctgcgtgctgccgatggtggttttcgtttggttcagggtatcgacaagctggtcgaacagcccgtcggcctgatccaaggtgccggacaacgaagtcaacgtgccatccagcgtgccgttcagggcggcgaaactgttcaatgatgaggtgagcgacggcattacggtgccggtcagcgagccgcgcgcggtattcagcgccgcgatgccgccggtggtggtgttggtcatggctccggaaaggttcgtggtggcgtctttgctggagttgatgaactgtgtggtgtcggtatggaaggtgttgagctgtgtctgctgtttgctgatcaatgagtcgagcgcatcgatttgtttccagatgttctggccgaccgggtcggtggtgtctttgccgatgccggctttggtcagcgcgtctttcagatcgctgattgacgtttgggtggcgttcagtggggccgaaagtgtgttggtgatggtgtcgacggagttctgcgcgctgttgaaggagccggtgatgctgccggcggcgttgttgacgtggacggccagtccggagagttgtgctgaactgctgtcgagcgcgccgaccagtgtggtggagaaggcttgtgacccggcctgtgtttccgccaacagtgtgccggactggcgggaggcattctgcgcggccgcgacggtctgcttgagtgaggcggtggtctgtttggcgtcggcgagaatcgtgtctgattgggccagcgtgtcctgtaagtcggtgagtgaatcctgaacggtgttcagcgtggacatcaccgtattgagatcatcgatcgtatcgtgctggactttgccagtggcttggccgagatcgtctccggtttcggaaatggccgaggcaacggtggtggctaccgtggtgacgaaggcggagttgatctgctcatcgatggtggtggcgccggtgtcggtgattttcggcgcgatcgcgttcttcttctcgttgacgtaatacttgattttcggctgtttggaggttccggtcaccgattcgaccaagctggcgctgaaatccttgggcagcacgatggctgcatagtatccgccggtctccacgccgtggacggcctgttcctcattgtctacgaagcgccagccgagttcgtcgttctgcttgagtttcttgacgacctgccggcccgcatcgagatggccgaccagatcgttggtggtgccttggtcttcattggctacggccacttgcagattgccggtggctgaatagggatcccagttggcgagaatgttgaaccatgcgtacagcgagggcagcattgctacgccgagcgtcaccacaacggcaacgggattgcgtaagatacgtctgcaatcgcgtagaaagacttgccaaaccgtccgcatccagtccctcttttccggttcgtagtcattgcggccacatgcagtctattcccaccactggtgcggatactgctggtttggcgggttttcttgcaaaactggccgttggttgtccgcataatgggactgatatgtgaacgtttgttgatggtgcgacaccggcgggatggttgtgcaattttgccggtatccggtgatgaaatgttgaggtgttggaactgagtcgtcgcagtgctgagaccgagacgactcagtgacgagcctatccgaggctatctcgttggttctggtctcactgatccagacggaagccctgagcggcggccttgtcgagcagtgtctgatggctgacatcctgccgactgatcgtggcgacctgatcgctgaaagcgtccaccggacggtcggcttggcgcagatcgtagtaccggtgaacttcctcgtcgaaggcgggcagctggtcgagtacgccatcggcgtcagccgggtaggtgttctcgaagaactgcatcgtgcgcggcatgcgcggcttgacggtcgggttctgatcgggcttgccgatggccagacccagcaccggatacgtgtattccggcagattcagcacgtcgataaggccggggatgttgttgagcagagagccgagaatcacgcagcccagtcccagcgaataggcggcggtctccatggcgtgcagggccagcacggcgtcgttctgagcttgggtgaagcgatagctgtacttgagatggaattcgtcggaagcgggatcgatacccttgcgttcggcgatgcgtgcgttgcggtgctcgtcgatgacgaacacgtacagcaacggcgcggtggcgatatacggctgatggccgaattcggcgagcttggctttggtggccgggtcggtgatacggatggcggaccagtcgttaaggaactggctggacgcggcatgttgggcgacggtttcgagcgtggcgcgggtatcgtcgtcgatggcctcgtccttgaacttacggatggagcggcggcccagaagagcctcgattgttgcgttggtaaccatggctttattgtcgcacggcagacgccggacgccacggtggattacctcacagtgaaatgccgatattgtgtggcggaactgtgctggactgatggttcctgtcgattgactgatggttccttgacgaaattccagcgatgagtcatcagtcagccaacagaaaccatcatccaaccgggggattagcggctgggcttgcgatggcggtggtcgacgaacgccttggagccccgatccgacagctgcgaaaccactgcgccgagtgcggccgaaacggcggcgaatgccagactcattgccagactttgcggcgcgtctgccgccagtcccttgcgcagattgcgtttgcttgtgcccttgtcccatatcatctggaatgctttgccggcaaccaagcctgccagcgctgggactgccgacttgatgagcttgtcgcccagagaatcagggtcgttgagccggtcctcgcgcagcctgttgaccttctcgtcgatgcggtgcaggctgtcgaccgcgcggtcggcgctggaggggaagtcggtgttcgtttcgtcgctcatgactctcagtctaatagcatctcaatcatctcagcgcaaaagatgggcgttaatggtggagtcatgaacgagcgcagactagagtggaggcatgagcgaacagaacgtgaacggcaccgttgccgtcgagaactctcgtggcggcaatggatttttggtgttgctgcgccacggccagaccgtgtggagcgaatccgggcagcataccgggcgcacggacatcccgttgaccgcggtcggcgagcagcaggcagcggatgccggaaggcgcctgcgcgaggctttccccgaaggattcagccagggctgtgtgttttccagtccgctgaagcgggcgtgccaaaccgctgaattggctggttttgcggaccacggtgtgttggacggcatcgctgaatgggattacggccgagccgaggggcgtacgcgccagcaggtgagtgaggccagcggttttgaatgggatgtgtggcgtgacgggccgcgctcgctgacgcccacgctggagggcgactgggtcgagaccttgccttcgggcgaacaggtgccggtccatgccgggcctggcgagacgctggaagaagcggcggcacgcgccaagagcgccatcgacgagattacgccgctgctgaaagacggccataatgtgctgttggtggctcatgcgcacatcctgcgcatcctcacctcgcaatggctgggcgtggacccgcatttcgcacggttgctgcgtttggatacggcgcactactcggtgctcagcgtctataagggagataacgtcatcgaacggtggaacgcctagccccggttgcgctgcgattgcgctggcctgcccgctactgcgggcgggcctttattgtttgtggcgggaattgcggtatgtcgataaatgatttgcaaacgatagcgtcggcgtgttgttttttgatgggtataagtggcaatcgattgccatgaaagatatgttagcgctctcatgattgcgaacgcttgcattgcgataatgaggcaaaaatgactgaattaatgggatatttgttgacaatggcctgaaaatgatgatttatgacgcgccgatattgctatcgtttgcaaaaagaagcaaaccgttgcacaatagtgcatgtcgatagtcgtaaaggtgcgtgctagcgtacctgtcccgaccggggacggccgggtcgacgatgaaagagaaaggttcgatgatgaatcgtacagtcaagtcagcagtcgcgatggcggctgtcgctgcgatgtccctcggcgctttggcggcctgcggaagctcgacctccggcgatgacgccaagggcaaggtctactacctgaatttcaagccggaagcggctgatcagtggaccgctctggccaaggaatacaccaaggaaaagggcgttgaggtcaaggtgcagaccgcggcctccggtacctacgagcagaccctgaagtccgaaatcgccaaaaccgaagccccgaccttgttccaggtcaacggcccggtcggctaccagaactggaagaagtacaccgccgatatgtccaatacggatgtgtacaaggagctcaccaaccaggatgtggccctgaaggatggcgacaaggtggtcggcgtgccgtacgtgatggaaacctacggcctgatctacaacaaggacatcctcaacaagtacttcgcgctggatggcgccaaggccacgtccatggacgaaatcgacaacttcgacaccctgaaggccgtggccgacgacatgcaggcccgcaaggacgagctcggcatcaagggcgcgttcacctccgccggcttcgactccagctccgactggcgcttcaagacccacctggccaatctgccgctttactacgagttcaaggacgacaacgtcaccgagcagccggccaagatcaagggcacctacctgccgaactacaagaagatcttcgacctgtacatcaccgactccaccaccgaacccacccagctgagcgccaagaccggagatgatgcgaactccgagttcgcgctcggcgaggccgccttctaccagaacggcacctgggcctggaccgacctgcagaaggccggcatgaccgccgctcaggtaggcatgatgccgatctacatcggcgtcaagggcgaggagaagcagggtctgaccaccggttccgagaactactggtgtatcaatgacaaggcctccgacgccgacaagaaggccaccgaggacttcctcaagtgggtgatcacctctgataccggcaagaaggccctctctcaggacatgggcttcaccaccccgttcaagaccttcgatgacgtcaaaagcgacaacccgctgaccgaggccgccgtggaagaccaggagtccggcaagacccaggtttcttggaacttcaccatgatgccgtccgaggaatggaagaacaaggtcggccaggcgctgctcgagtacgcgcagggcaccggcaagtgggatgccgtcaagaccgccttcgtggacggttgggcttccgaatacgaggcctcgcactgagtctcatagagtcccatagccgataagcaacaatccgcggcgcccctgcctttccttctccaggggcgccgctttgtattgctgagtctcgcacaaaatcgtccgccgcagaaaagtgtgaggcacgcacccgctcaatcgcacgctgtggggccatgaatcggcgatttttcgccatttcccacaatgtgcgattgagcgttattgtgcggttgcctcacactttttctatggtgggctttgttgtgtgggcctacttaacgcgggaggtggaggagcggaccttcagctgggccgggaacacgatgtagggttgctcaatcggcttctcgtcaatgagatcgagcgtcatgcgggctgccacgcgggccatttccaccggatcctggcggatggtggtcaggccgatatcgccggtgtagaaactatcgtcgtagccgaccagcgagacgtcgccgggcacggagaatccattgcgctccagctggaacataagcggcaaagcgatgccatcctcctggcatgcgatggcggtgggcatctcgtcttggctcatgagttggtcgaccacgtcgctgatttcataacgtccatcgtcatcgaccttgcagacgatgacctgcggctcaatgccttccctgcggcagcaggcggtgaatgagtcgaatcggctttgcacggagaagctcagcgacacctcgcgattggtgctgatataggtgatgcggcgatgtccgagattgataagatggcgggcggccagcgtggagccctgcacatcgtcgatattgacggcggcggtaaagccgcgggcttcgggctcgactgaattgatgccgacgatcggcacgccgaccgaagccagttgtgcgatttcgttgttgtcgatatcgaaagacgccacaatcacggcatcggcgttacggcgtaccggcaacatctcgaagaattccttgcgctcctcgatgctggaaatctggaataccgaaatatcgtagccctgcgtgtgcagcacctcgttgagcccctcgatgaccgaggcggtgaaccacaggcggatatggccgctcatcagtactgcgatgcgcagggcgcggccggatttcagggccgcagccgagcgggagagtgagaaattgagtttgtcggcgatggcgagcacgcgctcgcgggtcttggccgacaccagatccggtctggtgaaggaacgtgagacggtggagatggagacgccggcctcgcgggcgacatcctgaatgctcgtagccattgcagcccccttgcgttgaatggaaaatcgcaatacacatgcacaactgactacagtgtacatgctgattgattgatttgcggcgatgacaacgattgtattacaaacgtttgcaaagtgtctatgacggcgtcatattggctttatatagccattatcttagttgaaagaagattgctggagctggagtatgctcgagattgaaacgctgaaaatgacaacgtttgacatataatgattcgacgtctactatgaacataggcttgaacgagaacaggccgtgcatgcggttctcgatcggcaggctcgcattgagttgaactccgcagccggcgcacgatgcagtgtcgcaacgcagcggactcaaggaggaggaaaagtcatgatcagcatggctggcaaggcgatacgcagatggtgggcgctgttcgcgctccccacattcgccgcattcatcatcgggttcctggtgcccttcatcatgggcatctacttaagcttctgcgaattcaccaccgttaccgacggtgaatgggtggggcttaagaactatggcaaagcgttgaaagacaaggaattcctgcacgcgctcggcttctccaccgcgtttaccatcgtgaccaccatcgtgatcaacgtgatcgccttcgccatcgcctacatgctgaccaaggcgatcaagggctccacgctgttccgctcggtattcttcatgccgaaccttatcggcggcatcatcctgggctacatctggctgctgctcctgaacggcgtactagcccactggggccgcgccctgacctataaggcgtcctacgggttctggggcttggtcatcctggtgtgctggcagcagatcggctacatgatgatcatctacatcgccggcctgcaagccctgcccgccgatgtgctggaggccgcggccgtggacggcgccaacggacggcagaccatgttccgcatcatcatcccgctgatgatgccgtccatcaccgtgtgctccttcctgaccgtgaccaacggtttcaagctctacgatcagaacctcgcattgaccaacggtgcgccgagcaacatgtctgaaggtctggcgctgaacatcacccgcaccttctacggccgtatgggctgggaaggcgtcggccaggcgaaggccgtgctgttcttcatcctggtcgctgtcatcgccctgattcagaacaagctcaccacgagcaaggaggtggcagcctgatgaacgagaacaagcctgtgaagcatggcgcattatggaccgtgctgtttgccgtcgtctccctgttctgggttttcccgatcgtcctggtgctgatcaactccttcaagcagaaggcgtacatctccaagaacgccttctccctgcctgccggcaaggcgttcgtgggacttgagaactatgtgcgcggcatcgagaccacgcagtttttcgcctccttcggctggacgctgcttatcaccgtcggctcggtggtgctgattctggtgtgcacctcgatgtgcgcatggtggatcgtgcgcgtgaacaactgggctgcgaagctgctctacaccctgttcctgttcaacatgatcgtgccgttccagatggtgatgttcaccctctccaagatcgccgacatgctgaagctcaataccccgtggggcctgtgcatcgtgtacctcggtttcggggccggtctggccgtgttcatcttcaccggcgtgatcaagggcatcccgcaggagcttgaggagtccgccatgatcgacggcgcgtcagtgccgcgcatcttcttccagatcgtggtgccgatcatgaagccgtcgatcgtctcggtggccatcctcgaagccatgtggatctggaacgattacctgctgccgtacctgacgctcgacctcggcaagtacaagaccatctcggtcgccgtgcaatacctcaagggcggctacggttccgtggatatgggcgccatgatggcctgcctggtgctggccatcatccccatcatcgtcttctacttggtatgccagaagtatatagtctctggtgtcatggcgggagccgtcaagggctgacgactcgcgtcgtcagcccatggctggaagcccagtgggcttccagcaggctccaggctgagccgcgacagcggcgaagctaatgatgagcctcgtcgtaggcgagtccgtaattgcagggccgaaggcggagcggtcaagggctgagctccaccaatccggctcccctctttgaggggagccgtcggcggaagccgactgaggggagtatcctgagctccatcaagtctcccctcagtcatctgcgatgacagctcccctcagagaggggagccacaggcgacacaaggagtagttgatgaactggctggcaccggactcgaaattcatgcgcgcgtggagcaatcttgttgacggcgtatggatcaacattctgatgctggtcacttcgattccgctcatcaccatcggtgcggccctgaccgccggccatgatgcttgccgccgctccatcgagggcgagggcaaaggcgtaaccgccaactacttcaagtcattcaaagccaacttcatcaaagccacactgctgtggctgccgttcttggtggtgctgattgcactggtctggtcatggatcgtcctgcagatcacgccgctgctcatcatcaaattcgcgctgaccatcctctggcttatcggcttcgaatgggtgttcgcgcttcaggcacgcttcgagaacaccgtggccggcaccttgaagaacgccttcatcttcggcatctcccacatcgcgatgaccgtggccctggtcatcgtggatgccgtgttcgtggcgctgctggtggccagctggttctacatgcccggtggactgttcctgctggtgattcttggttacggcaccatgctgatgctccatatccccgtcaccgagcgtgttttcaatccatatctcattgactaggcgggttctctcgcgaatatgcggcgatcttcgaggtctgagcgttctctgtccacgcaagcgcggtaaagataacaaattga

SEQ ID NO: 3024 - DNA, 9550 bp, Unknown
  R19_24m  MAG No. k141_17336
gcgtccgcgtccacgtagttgttgtagctcatcggcttgccgccgagctgctcggcgtgggcgaaaccggtctggttgagcgggtcaatgtagagggcggcctgctggtgggagttctcgccgtagcgaagggtgtgggcgcggtcccaggtacgggtgaatcgtgccgggaacttggcggaatcgacttcggcgccctgatcgtccttgtccacctcgacggcgtccagagaggccggcttcggccagtgcttggcggtccattcgttgatggtggcgtcataggcggcggtgtgggcgaatgccttggcggcaagccacttgcgctcgtcgagggagaagccggtgccgtcggccacacgctcggcgaccaaggcgtaatcggccggatcggtgacgatggccacggtggcgtggttcttggccgcgccacgcaccatggaggggccgccgatgtcgatcttctcgatggtgtcggcctcgttggcgccggagcgaacggtgtcggcgaacgggtacaggttgacgaccaccagatcgaacggcttgatgccgaactcctcgagctgcttggcatgctcggggttggtcatatcagccagaatgccggcgtgaatgtacggatgcagcgtcttgacgcggccgtcgaggcattcggggaatccggtgacatcggacacctcggttaccttgacgcccagctcggcgagcttcctggcggtcgaaccggtggaaacgacttcggtgccggccttcacgaacgcttccgcgagtacttcgatgccttccttatgaaagaccgagaccagtgcccgacggatcggtcggttcgtgtttgtcatcctgttcctccttggattcttgtggttgtgacgccagggaccgcgcctgacggacgatgacggtcttcggggtcgcggcggtggtgcgggaatcattgatcctcccaaccaaccagcctatcgaaaaaacgagcactgtgccaatcagcgcgagcagccatgccgcggtaaatcccaatgcggtcgaatgaccgacgactctggtggaagccatgacgtcgacgccaatgtgagcgagacgatgatcgccaagcgatccattggacagagcgaacagcaatgtggatgccagtgagatcagcatcgcgctcaggcagaatgacccggcggagtagatcagcgaaaccagtactgggccgcgggtggacgcattccgtatattcaacggtctgcaggcgaatccttgcggtaggaatacagccagcaggcccacgagcgcagcgatggcgagaggcgcgttcaaggcaacggtacgccatagttcgctgctgaccggttcgggcagaataccgaatgccggtattgcaggaagctctttggattggccgagccataacgtgaaactggccaaatcaccgatggcgaatccgccgccgaagagccaggaaacagcccagagcatgacgttgggtagccagatcagcatggcgacggtggtgagaattcgtgaaccggtttccatcccggacaattcgaacaacgatacgacagcggcatggttgcgtaccgaccatacgatgacggtaatcaatccaattgccaggtatatgcccagtatcgcgacggccaagacgacgccgattttcaggcagtggcgtatgtccgccggcacctgcttgcgagtccagtccctgaatgctcgcatcttggctgattccggtacggctgcgcataggaaaccgatcgagaatacgatggctgctttcagcaacaccagccactggtcatcgacaagacctaggtgtacggattgccggaatgcctcgttcaacccgagccaaacaatcaatccggcaacatacgcatgcggcccgtatgctttgattcgcatggtgagtgcattgatcagccatatcagcagtatggtcaacatcaatggcgtgatggtgagggtgaacgaatcggttctagagcccgatccctcactcagaagcacaacggcctgtgtcagcgaggttgtgccgacggtgagattgtcgccaccctcttccatggagacaaccaataacatcagcgctgtatagcaacctaatgcaacggcatagatggccatggatgcgagggcgactatggctccccgcacccattggcgaatcacggctttcatcacgattggttggaaccgatcagtcgatgttggccttggcgagtatgtcgcgcatgatttcagcggcctggcccggggtcttgcccacggggatacccgccgcttcgagcgcgttcttcttgtcctgggcggtgcccttgcctccggagacgatggcgccggcgtggcccatctgcttgccttcgggggcggtgaaaccggcgatgtaggcgacaaccggcttggtcatgtgctccttggcccatgcggcggcgtcctgttcggcgaagccgccgatctcgccgatcatcatgacagccttggtgtcggggtcggcttcgaatgcctgcagggcttccagcagcgtcgtgccgacgatcggatcgccgccggcgccgagacatgcggtgaagccgatatcggacagttcgcccatgagctggtaggtgagggtgccggatttggagaccagtccgagcgggccgcggccgacgatgccgtcggggatgatgcccaagttgacgccagggttgccgagcgtgatgaaaccggggcagttcggtccgatgatgcgcacgcccttcttgagcgccagttcgacgaagtatgcggaatcggccaccggaatgccttcagtgatgaccacgatgagttcgatgccggcttcgacggcttcgaccacggcggacttggcgaacttcggcggcacgaacaccacgctggccttggcgccggtggcttcacgtgcttcgccgcaggtggcgaacacggggatgtccacgtcggcaccgttcttggcaccggggaaggggacggatgtgccggccttgcgcgggttcacgccgccgacgatattggtgccggccttgagcatgcgagccgtgtgggtcatgccctgatggccggtcatgccctggacgataacgggagcgccgtcttcgatgaacagcatcagcgaacctccttggactgggtcgcctcaccggcgagctgcgcggccttggctgccgcgccttccatggtttcggacacatggatattcggattgttggcggaagcgaggatatgcagaccctcggcggcggcgttgccatcgaaacgcacgacgatcggcttggaaccgccgagcttggcgaccgcttcgaggatgccgttggcgacttccacgcaggaggtgatgccgccatagacattgatgaacacggattcgacctgagggtcggacagtacgatctccaggctttcggccatgacggctgcggaggcgccgccgccgatgtccaggaagttggcgggcttgatgttggtgccctgttcctcgccagcgccggagacggcatccagggaactcatgacgagtcctgcgccgttgccgatcacaccgacctcgccgtgcaggtgcacgtagtgcaggccgtgttcgcgggcgcgctgttcgaaggggtcgggaacgatgagatccacgaaacgcgcccagccatcatggcggaaggaggcgttgtcatccaaggagatcttggcgtccaaggcgctcagctgcttggtggattcgtcatccgggtcgccgatcttggcgagcggattgatttccacgagcgtggcatcgttgtctttgaagcagcgccacatcttgagcagaatctgtgcggcctgatcgacgtccgcgtggtagaagccgatgctctgtgccatttcggtggcagcggccaggtcgaagtcgccgagcgcatcgatgtgcaggcgcttgacggcctccggatgttccttggcgatttcctcgacttcggtgccgccgttggcggtggccagcacgtcgaagtcgcgcgaggtgcggtccacggagatggacacgtaatattcgtgcaggatgttcttggcttcggccacaagcacgccggaaaccttgtgcccgtggatggtcatcggcaggatggactcggattcaagaatcgcctcgtcgcggttatgggcgatcttgacgccgccggcctgaccacgatgaccgatcttgacctgcgccttgattacgcagggatagccgattttgtccgccgcttcggcgacttcatgggagttctgggcaaagatggcgtccggggtgggaatgtcctgttcctcgagcagctgacgcgcctggtattcgtaaagatccatcgatccttccctgactatgtaattggtccggcatataactgtacacagtacatgccggaccttgaaaactaactgtacgttgggtgagacggaatctcaggccggcatcgcgatcagcgagctgctgggcttgccgccgagcttatccagaccgtcgagaccatcgagccgcatcacaaaactgaagcccaccacagtgccgcccgccttttcgataaggtcggcgccggctttggcggtgccgcctgtggcgatgagatcatcgacaatgagcactcgctcccccgcctgtacggcgtcggtttcgatttcgacgctggccgtgccgtattcgaggtcataggattcaccgatggtttcgggcggcaatttaccggccttgcgcacggcgatgaaacccttgcccagatgggcggccatggccgggccgaacaggaacccgcgcgattcgagaccggcaatggagtcgaattcgctcggggacaccggcagagccgtttcaagcgccttgagcagaatcttcaagcccttggggtcggcgagcactggcatgaaatcacggaagataatgccttccttgggaaaccccggtatggaacgcaccaaggacaccagatattcggcgtcctgttgccctaccttgctcaatgcgtcgatggtgatgtccgactgtgccatagtgctcgccccttttatgcctttgcgatgcgatactcggatggtgctaccgaatcgaacagcttacttcgtcttggtttcgttgtcgtcaccggtctcgtcagcggtgtcttcctcggacacgacggacgcctcgatcggaacctgaccagcctcatcgttagccggagcctcggtgtcttcgtcgggcagcgggttgccgttctcgtcgacctcatcatcggacacataggccgggcgggtgtactcacgggcgatggcgttgaagccgaaacgcagcttggagccttcggagtcgatgacgatctcctcatactgctcgtcgacttcgacgaccttgccgatcacctggccgatggtgatgacctcggtgccgggctgcaggttgcgacggaagtcctgcttctcctgctgttgctgcttggccttcttggactgccaccacatcatgccgccgaacacgacgacgatcacgatgagcataatgtactgttgttccacgaaacaactccttcaaacgagcgacattgacgaaacgccgccaagtgtgcaaacaggagaaagtctagaagagcttgctgacatcatctttgggcgtaattcccaaatgctgccatgccttctcggtagccacgcggcctttgggcgtgcgaatcataaaaccttcgcgcacaagatacggctcgcacacggtttccacggtttccgattcctcgcccaccatggccgccagattgttcaggcccacgggtccaccgttgaagttgcgcacgatggcattgagcacggcgatgtccagccggtcgaggccttcggagtcgatctggtacagggccagcgcctccttgacgtcgtccggccgcaccacgatcaggtcgtggacgatggcccagtcgcgtacacggcgtagcaatcggttggcgatacgcggcgtgccgcgcgaacgcaacgcaagctcatgagcggaacccgcatcaaggtttacgcccagtacgttggccgaacgttcgatgagcttttccaactcctcatgcggatagaagtcgagatgtgcggtgaagccaaagcgtgcgcgcaacgggcttggcagcataccttcgcgcgtggtggcaccgatgacggtgaatcgcggcagggtcagcgggatggagcttgcgcccgggcctttgccgaccatcacatcgacgcggaagtcctccatcgcgatatacagcagctcttcggcggcgcgcggcagacgatggatctcgtcgatgaacagcacttcgccgacgtcgagggagctcagaatcgaagcaagatcaccggcatgttgaaccgcagggccggaagtcacgcgaatcggcacttcaagctcattggcaacgatcatggccaacgtggttttgcccaagccaggagggccggcaagcagaatatggtccggtggcacatcgcgtttgcgggccgcgtccaggaacagttgcagctgggccttgagccgtggctgtccgataaagccttcgagaacatgggggcgcagctcctcgtcgctgaccggctcgttgccgatcggctgggaggagaccatgcgcaacgactcttcgttggcaccggtgtttgaggtaccgtaatccgttgtctcgctcatcagcggcccctatccatcagcgccaaagccagacgtagcacacgcggcacatcgtcggtggcaagcggcgtgggaatatcgttttcggcgcaagcctcggcaacggcctgctgggcgtcctgctgacgccagccaagtgaaatcagtccttcgacaacctgttccgtaccggtatccaccggagacttggatattgccgcctgagcggaagcaccctcgatctgactcaaatcaatagagcccttaagctcgaggatgattttctgtgcgcccttcttgcccagccccggagccttggccagcgcggtggcgtcgttgtcggcgatggcgtgggccagctgactcggcgtcagtgtggagagtaacgattgggccactttaggtccaatgccggagaccttgatgagttgcagaaaggttttcttggcgtcccgatccaggaatccatgcagggtaatggcatcctgagagaggttcatataggtgaagacgcgggtgtcttgcccggcgtgcagacggctcaggtcggtggcggacatgcgcacttcgtagcccactcccccaacatcaatcaatgcggtatcggtttcgaccgattcaacccgcccggtcagcatgccgatcatacaggtactccttcagggctccaggattcaagactcgaacaactgttcgaaagtatactacatgcctcggtcgtggttgatgcggcggcgcgtggatttctgtgcggcctcagcccactggcgttgcgcggcggtcagatgttgttcgcgttcgccgccctgcaatgcgcctgccgggcgcagcgcatggcaaatggccaaagccaaggcatcggcggcatcggcgggagtcggcattttggtgaggttcaaaatacgtgtcaccatacgctccacctgaatcttctgcgcctgcccgttaccggtgatagccagcttggcttcggtaggcgtatgcaacgccacgggaatattgcgttgcgcggcggcgagcatggcgaggccggcggcctgtgcggtaccgagtacggtgttgcggttggattgtgcgaacactcgttcgatggatacggcatcgggtgcgaagcgatccattttctcggacaggccgttgtagatggccagtagacgcagatcctgggtgatatccggtgaggaccgcaccacgtccacgtgaataaacgaaagccggcggtgctcgccggcttcgatcacgccgaccccgcagcgtgtaagcccggggtcgacgccaaggataatcacgaggattactcctcgtcgagctgggccatcacctcgtcggaagcggtccagttggagtagatgttctgcacatcgtcgagatcatcgaggttgtcgatgagcttggacaccttgcgggcatcgtcgaggctcaactcgacctcgttcttcggctgcatgacctggtcggcggaatcgtagtcgaagccggcgtcctgcagagccttgcgcacggtgaacaggtcggacggaccggtcacaacggtgaacacctcaccgtcatcggtaacgtcctcggcaccggcttcggcggcggtttcgaacagcttgtcgaagtccacgccctcggacggcaccacgatctggcccttgcgctcgaagttgaaggacacggagccggaggtggccagggagccgttgcccttggtcagggtggaacggacttcggcggccgcacggttgcggttgtcggtaaggcattcgatgatgaggccaacgccggcaggagcgtagccctcgtagacgatgtcttcgtagttggcggcgccgtcttcagcaccggcaccacgcttgacggcacgagcgatgttgtcggccggcatggaggccttcttggccttgtagatggcatcgtacagggacgggttgccgtccgggtcgccaccgccgaggcgggcggcgatttcgatgttcttgatgagcttggcgaagagcttgccgcgcttggcgtcgatggcggccttcttgtgcttggtggtcgcccacttggaatgacctgacataatgctcctagcaattattgaaacggatgatgtcaaacgaaacgattgtaggccgttaatcagacatacccgtgatgtttccgatgattgtcttgttatgcgtaccgataagaccggtcacgcggggtgccgcacctgtgttaggcaagcggcagatgatactgcggagccagctgttcgaatgcctgggcataggcttctcgctggtcggacagcagaataggcatggtgcgtgtctgggcgacgatgggcatgaagttcgcgtcaccattccagcgaggcactacatgctgatggaggtgagcggcgactcctgcgcctgctacttcgccctgattaatgccgatattgtaaccgtgcggacgggagacggtttccatcaccttcatggcgagggtggtggccttctcgaattcgaacagttcggcatcgccgagttcggtgatgaatccgacgtgacggtacgggcagatcatgagatgcccgacattgtatgggtagaggttcatgatggcgaacacgtgcgtgccacgccaggcgatgaggccgtcttcgtcggatttcttgggtccggcgcagaacgggcattccttcgtcttgggcttggttgggcgattctcgctgttgcgcagcacataggtcatgcgctgcggagtccacagtcgttcgaccgtgtcctcctgaggcggaaagtccgccggattatcgacacgcacgtcagtcattttcgcaccctttcttggctcccctctctgaggggagctgtccgagaaacggactggggggagtgcgagccatgcaggactccccccagtcgcctacggagccagctcccctcagagaggggagccagtacaattcacatcactcagccacagcggcgttgaagtcgtcggcggagttcaactgga

SEQ ID NO: 3025 - DNA, 17494 bp, Unknown
  R19_24m  MAG No. k141_17436
aacaattccggctcttccggctccgattcaggaacaaccaccacgccctccggccgactctggcacgccaccgtagcccaggctcaggcctatgccgccggtgccgccgcgcagcgcgggtggacaggcaacgactgggattgcctggtcaaactatggaaccgcgagtccagatggctgtggtatgccgaaaacgcgagctccggtgcctacggcattcctcagtcgcgaccagcagacaaaatggctgcgttcggcgccaattaccgtgacgatgccgccgtacagatcgattggggtctgtggtacatcgcacaagcctacggcagcccgtccaaggcatggcaacattccgaacaaatcggttggtactgatcggttacgaagcccacaaggaacacacgcttatgaacgacaccattcccgccaccggtcacctgttaggcgccgccgatatccgtcgtatcgcggccgatgccggcatcagccccaccaagaaattcgggcagaacttcgtcatcgaccccggcacggtccgtcgtatcgtacgagaggcgggagtgaccgctgccgatcatgtcatggaagtcggccccggcctgggatcgttgacattggcgattctggaaaccggcgccaccatgaccgcagtcgaaatcgatccgccgttggccgaacgactgccgggcacagtcgccgaattcatgcccgaagccacgtcacgactcaccgtcgtcaatcgggatgccttaaccgtcaccccggagaacgtgcctgatttcagcgatgacgcatcgtttacgctggtcgccaatctgccgtacaacgtggccacgccgattctgctcacgctgttggagcgtttcgacaacctcggctcgttcttggtgatggtgcaaaaagaggtggccgacagactcgccgccaagcccggttccaagatctacggcacgccgagcgtgaagctcgcctggtatggcaccgccgaacgggtgggcaccatcggccgcaatgtgttctggccggctcccaatgtggattccgcgctcgtcagattcacccggtatcaggccgatgacccggccgccccggaagcctcgaacagcacggccgacggcggcgcacaacgggaactcgtatttcgtctgattgatgcggcgttcggtcagcgtcgcaagaccctgcacgcggcattgaagaccattgcgccctccgaggcattctccatcgccggcatcgatccgacccgtcgaggagagacgctcaccatcgccgaattcaccgctctggccaaggccatcgaatcgtgtggagatggagatgaggcacaatgagtccggtaatctcacatccacgcccagccgctgcccgacatcagttcgatgagctctcccccatcaccattacggtggattgcccggcgaaaaccaatctcaccttggaagtgggacctgctcacgacgaatggggcggacgccacgaactggacaccacctactgtgcaatcggcgtatacgacaccgtcaccgcaaccgccaagcaacccggagcgggattctctctggagctcgaaggcgcttatttgggcgacttggcctcctcacacagcgacatgcgccgcaaccatgcggtactggccctcttcgccatggcccaggcggccgagcgcgagccggatgtggcgttgaccatcaccaagcgcattcccgtgggtgccggactaggcggcggttcagccgacgccgcggcgaccatgctggcggtcaatcgtctctgggatctgaactggcctatagagcgcctgcgcaccattgccgccacgttgggcgcggatatgccgttctgcctgaccggtggccttgcatacggcaccggtttcggcgaacgcatcacggatatcgcccccggcagccgcgatgagctggcgctgatagaacagggattcagcggcgaagtattggtcggcgcgtaccagtcgcaactcagcactcctgaggtctaccacacctttgacctcgtgggagccgcagaaggcgaccgcaatcatctgcaggctgcggcaatcagcctgcatccccgcagcgggcaggccatcgacgccgccacgcaggcgggtgccagccatgcattcgtctccggatccggcccctcagtggtcgctttcgccgccgacgaggcagcggcacaacgcattatcgatgtgtggcgcgatacggctgtggtcgatcgcattattcgagccaaatctcccgcacaccccaatatcggcgtcagacagtgacgctaaggtagcaaccagccacccgacccatgaaagaagtccaccgatgacgtatcaggttgatgaacgtgaagcccgcaaggcgtacgtgcgccaccgccagaccatcgtcttttccatcagcggcgcggtattggcagtagtgctggtcatagccctactgttcaatttccacgttttcggcctcggcgaagtggagactccggcccgccagccgaattacggcaacgcggcaccgtgcgcggtcaaggacagcagcggcaaagcgcaatacgtgtccaacgcttcggtcggcatccgcgtgatgaacggcacctctcacggccaattcgccaaggccgtgggtgaggctttggccaatcgtggattcagcgtgcagaaaatcgataactattccagcaccggcgttgaacgcaccaccatctacttcggcaagaacgccattaatcaggcgtatacgctgatcggcaatttcaccgacgccaccatgatcatgacggctcgcgaggatcaactcattgatgtggtcatcggcgccacgttcaacgatctgcaggacaccaaatcctccccacaatccggtaagaccatcaccaatatcgagggttgcaaggccgccgatagcatgaccaagctgcccgccgacaccaaacacgacgcatacacggcggagtaaggcgcatacagcttcatcttcgcgaaaaaccgtacgctgacacgtattcagcgtacggttttttggtatcggactagtatcggactactgaatctcggcgtaccagcgcttgagttcttcgacggccacatcgtggtccaccggaccgttatccaagcggtattccagcatgtgcttgtaggcgcggccgatcatcgggccgggctccaggcccagcaactccataatttcgttgccgtccagatccgggcggatcgcgtcgaagtcctctttcttcttgagttcgcggacgcgctcctccatctcatccatggcctgggagaagatcatcgccttgcgcttgttttgtgtggtggcgtccgcgcgcgtgagcctgttcagccgctcgtacaggtgcccggcatccttgacataccggcgtacggccgagtcggtccacggctcgtccacatagccgtggaagcgcaggtgcatattcaccagttccgagacgtcctcgaccagatggtggtcaaaacgcagcgccttcaaacgcttgcgggtcattttggcacccaccgcgtcatggtggtggaagctcactttgccgcccggctcgaaccggcgggtcttcggcttgccgatatcgtgcatcacggcggccaagcgcagcgtcaggtcgggggcgggcaccgggccgtccgggccggtttccagggcgatcgcgcgttcgagcacaatcatcgtgtgctcgaagacgtccttgtggcggtggtgttcgtcgatctgcaattgcagggccggaatctccgggaagacgatgtccgcaagaccggattcgaccaacgcctcaaggccggcgcgcggacggtcggagagcagcagcttggtcagttcgtcgcgcacgcgctcggcggatacgatgtcgatgcggtcgcgcatcgaggtaatcgcctcggccgcgtccggcgcgatacggaagcccagctgggccacgaatcgcacggcgcgcatcatacgcaacggatcgtcgtcaaaggactgtcgcgggtccaccggcgtgcgcaacacgcccttggacagatcgctggcaccaccgaacgggtccacgaattgcaggtcgggcacgcgcagggccatcgcgttgacggtgaagtcgcggcgagacaggtcgccctcaagcgtgtcgccataattgacctcgggcttacgcgagtccggatcgtacatgtcggagcgataggtggtgacctccaccttgacctcggtgccgtccgggcggcggcgcatggcacccagcgtgccgaacttgcgccccatgtcccagaagccgtcatgcccccaccggcgcagtatcggctcgaactgctcaggccgtgcggatgagcagaagtccaaatcgtggctctttctatggagcagcaaatccctgaccgggccgccgaccaatgccagctcgtaaccctgttcggcgaacagtcgaccaagttcgatggcttcgggccatacttcgaaattcaatgggcaccttcccgcgtgcgacgtttttctgccctaccagcataccgttaccccacctgcacacggggttgagtaaggtggagaatatgattacgcccgccgaccttgcccgcatactggggcaaacaccagattcggcggatagccatacccaagaccacctgctgtatacgtccgaaactccgcatcattccgccgattcgggcgattctcccgatgccggcggcaccgcgagccactccaccaatcaggccgttcatcaagacgaagtagacgcagtaccgactacgcaacattccggtgtacccggcacacccgcaacgcccgccacacccgcaccatccgaatccgaaatatcggacgccgccagcgacatgcccacaccgaagccgatgatgcccacaccggccaccgtcttcggcatgcatgccaccgtcaccatcgccactaccagcggcactatcgaggggcaggccgatggtatcgccggcgaggccggtgccgagacgattgccaaggtcgagccgattatcgccacggcacaaacgtccgtaaccatcgtcacgaacgattccgcggcgaccgcccacgcggccgtagatactgccgttgcggtcgccaaggccgccgccgcgcataccgcagcgataccgactccgcgcgacgtgctgatgccgcctgcggcacgtaccgcaccggccgcaacgccggtcaccatgccggtctcagcgccgtctgcagcaccagtgaggcccgcaacgtcagcgcatcccacgccggccacggtcttcggccggcatccgtccgcggatgttgcctcgccggaaccggcagtgccagtagaaccggtgacgccatccagcccgactccggccatgatgccgcaacgccgtacgtcggacggtccgaccacattcgcttcactggatgcccaggaactgccggtcgtacgcgaatattcggcaggcggtctgattttcgatgaccagaatcgcgtggccattatcgcccgtcattcccgctccggccatctcgaatggtgcttgccgaaggggcatatcgaaaaaggcgagaccccgcagcagaccgctgtgcgcgaagtgcatgaagagaccggcatcctgggcgaggtgatcgattccatcgccaccatcgactactggttcaccggcaccacgcagcgcgtgcataagctggtccatcacttcgcgctcaaacagaccggaggcgaactgacggtggaaggagacccggatcatgaggcggaagacgccctctgggtacgttttgaagatttggatgacgtgttgagctatcccaacgaacgcaaaatcgcgtggctctacgccaggaagaagaacaggcaggcaaacgagtgaacctacccggagtcttacgacattgcacacgtctggcacacgcactggcggctggcgtcgccgttgtggcgatgctggccgctccattgaccgtctacgcgaacgatacgacggacacgactgattcatccgatacgacggacgcaacgggcaatcagaccgagaatcagcccaagcagagcattgccatcacgcaaagcacccccatcgtcacctccaaatcgggctaccatgtcaccgcggtcatcagcaatacggacagcacggccacgtcaagcggcacactgcacctgaccaccaatacgctgttcacctttgtctcgcgcaccgatattcagaattgggccgagaacaacgcccccatccccacccccaacgagttgggttccgttgacgtgccatcgattcccgccggcggcactgccaccgtcaccatcgaggtgaacgccaatcagcagacccttgcctccatagggagctgggggccgaagccgctgatgctgtcgtatatcgtcggcaatcggatactcgccgatttgccgagttttctgacccgatcttcggatgggctcaacaccgcgacgacaccggccatgaacctgaccgtggccatgccctacaccgccagcggctggcaggtcgataacaaggccatcagcaatcgcattgccgaaaccaccacttcctcgacatcaacatcgtccaagtccaacagcacggacaaggccgacaagtccgataacgccgacgccggcaacgtggccaaagccactgatacgcaagccatatccttatccgagcaggatgccgataccgcgcgatcccttgggcagacattcgccaagcaccgctcgctgcaagtgatcgcggatcctctgtattggcgtcagtccgcagtgcaaccgtccattgccggcatcatgcagcccgccgactttgacatcaccgcctataccgcgctgggtgataccgcggcctacgaaaaggccggcatcaccactgaacagtggaacgccaagcaggcggccgcatggtatgccgccggaaacgactccgaaacaccctccgcgtacgcatggcagggcaacaactgttggacgttggatgcgctgaccgcagcacgcgagcagggctatgacacggtgattgccgatgcctctttcgatgccgaccagactgaagccgtacacacaggcacctacgtggtggatacgcctgccggcgatgtcaccgtgctgaaggagcaatcgaccttgggcatgctggccaagggccaacccaccagcacggacgcgcaggccgagtccagcgatgccggtcggttggcccgactggtcgctcagagcgcgttctaccagatggaacagccctatacatcccgatacctgcttatgacgttctcccgcaccacggaggccagctggatcgatcaggtgatgagcgccttcgagcaggcgtcctggttgaatctgacggatctgaagaccatggccaaggccgatccgtacgatgtcagcgattcggtcaatcccgacaaggccgatgatgccaacaccgccaatacccggtcggcattgagacagttggccgacagccggcatgacatcatgcgcatggccacctccatattgaagaacgagattgattccgacgaggtctcgtcgttggccccgcaggccctggcccggcaggatgccaatgacaccgtctcgcacagcaacgatccgacgcaatggattggctctttgctggtgctgcatgacgatatggcgctgcgatccatgtctggctccccccagccgacaaccacgcgaaaatccatggtcagagccgcgaaaacactggccagcgatcttctgaacggcgtacgcatcaacccatcggaatcaatatccgtgttcagcgaatccgcgaaaatgccaatcaccgtcagcaatgaccttccttatgccgtcagcgtgcaggtcaactcgctgactgactccatgcagatcgtcacctcgcgaaccactgacatcgatattcccgcgcatagcgacgctcaggtgaccttcaccatccgcgtttccacttccggctcatcgacggcccatgtgtcgctgagcgaccgggaaggcaacagcttcggcaacacgcaggataccgcgatcaccagtgtgatgcgcgtcagtgatgccagcggtttcattatcatcggcttcgccgtgctactgtgcattatcggcctgtggcggcagttccatcggaagaaggaccccgacgaatgagttcaaccgtaggtcgtaattccctgatcatggccacgggaaccgctgcttcccgtgtgaccggtcagctccgcacgattcttctcgctgcggccatcggcaccactggattggcggccaacgcctatcaggccggttccatgattccccaatccgtgttcacgctggtgtccggcggcatcttcaacgccgtgctggtgccccagattgtgcgcacgttgaaagaaaaagacgcccaagaacgactgaatcgtctggttacgttggccatcggcatcctgttggccatgaccgtggtgatggcggcggccagccctctgcttgcccgcctgtacgtgggtagcgacgatcaccagatgatagccctgaccacctcgttcaccctgtggtgtatgcctcaggtgttcttctacggcctgtatacggtattgggtcagatcctggccgccaaagaccatttcctcacgtatgcgtggagctcaaccggtgccaacattattagttgcgccggttttactggttttattctgctgttcagcaaggccaatgaacagcccctcgaattctggaccgccgacaaaatcgcgcttaccgcaggcacctggactttgggcgtggccttccaagcgctgatactgttcctgccactggcccgtatcgggttcaagtacaaacccagcttcgggcttggcggctttggactcaggtctatgggtcccgtggcgttaggctctttgggcgtggtggtcaccagtgagatctgcggcattatccttacccgtatcgccacatccgcaccgcagcgcgcccacgaactgacgggtgccagcctgttcagcgtggcaggcaacgcgacctatcagaatgcgtacaccctgttcatcctgccctattcgctcatcgccgtatcggtatccacggctatgttccccaaaatctcccgttctgtcgcagctgcgaatctggatgaggcacggcacgatctggtgagcgcgctgaacaacgtagggctgctgatcatatttttcgccgccgccatgattgtgttccccgaaccgatcatccgcgcattgcttccgtccgtctcgatggacgagaccatgctgatttcctacgcgcttatcgccctatctgtgggcactcctttgggatcggcgttcctgctgatccagcgcacgttctatgcctttgaggacggccttcaccccttcttgtccgcggtgatgcagtatgggttcacctcggtattcatgatgattggcatgatggtacttcctcctgagcattgggtactcggcatcgcctgctcggtgacactcggtggattactggcgttgccgctgacgttgatgatgttgcgccgcaagttcgaaggcaatcttggtggtcgggagatcacgaggacatatgccaaggccattgtggcggcgctggcttccggagttgtggtctggctgatcaaacgaccggtagtcgcactgttcggcgcggatattcgatcggtaggcgggcacatgagctggtggtctgcgctggccatctgcgtggtgctcaccatcgtgctggccgtagtatatgtggctgtgttgtgggtgatacgcaccccggaactcatcagcgcctatcactcgatactggcccgtctacacaagactccggccagtgaggacgttgctgtgacagcccagccggaaaaagtcgacgatacgcaaatcaatcctgagacggagcccgtcaaggatagccccacacgtagaatatctaagaccagtctcgaacaccaatcacacggagccgaacgcactatgaaaccgcaactcggagacacgattctcaaccgatacaccttggtatcatcgttgcgtgaggagcctggcattcaggcatggaaagccaacgaccgtgtgttggcaaaggattgccagctgttcatcattaccaatcgcagcgctttcgccgcaatcgatgagctcgctggtcgcatcgccgccactcgccctgatcgtgtgattcccgtactgaaataccgtatggaatccgacgtacttctcattgtcatgccggtggacagcggccaatgcctgactgactacatggtggataccgacaagccgctcagctacagcgccatccggtcgattatcggagaatgcgccaacgtgctgcgcgaggtcattgcggatactcccagcagcatcgtcatcacaaccgacaccgttcgagtgactacctccggtgtgcagattgccgatgcaccatgtgccacgatgctggccgacacgtccgctactgatctgcgtacggacggtcctgaacggtatgcgattcgcaagcttgcggcattgctctatgccctgctgacacgcacgccaagccaagcgacacccacattcaatctgcgcgccttgccgcaagacacccctggcgaattccgcgtgatttgcaagcgtggattggccttaagcaagcccgacgagcacacgttgccgatggctgcccttgtagaactcgacgccttgttgggtaattggaagccgctctctgaactgagcgatgctgatatcgctttgccgagcgtggaaagcgattgctcgattaccaaggcgatactgaagcccgccaacgagaccgatatcgtgcctattcccagcacgttgattaacagcagcagtcttccggaattgtctattgccccttccctgccggttcagccggccgccgtccccgctccgcacgcgatgtcaccggctcctctgcctgatgggtccagtactgctgacggcaaccagtctcaatctgacgcccgccgtctgtttgacttcaacctttctgacgcctgggagcacgagaatctttccggtgaagacaccggtgactggtacagcgaaatgaatccggcccccatcggcggtccgggtgataatactcggttgacggtgcctattgttaccggcggtatttccgatgccaccgtgggagagacgaccagtcgtattcccgtgttcgatgtcagcggccgtgctgtggcccccggtgaggaatcgctgcgtgccttggaagaggagcaggcccgcattgccgaagtaagcgccattcctccgagcttcacaccgaaggatgtgccggatgacgaggatgacagcaagctgcccgatgaacatctgttcggcaaactgtcgaccaaggtcgttgccatcattgtggctctgatattggtagtggcagcggctgtttgggcagtgcatgcgttccaatcctccggagacaatcctgccgatgcttccagcaactccagtgaaggtgactggcccgatatcaatgctgacgctgtgccattcggtggcagcaagaacgcgacgaacggtggcgccactgacgattcctcaaagtcgagtgatgccactcagagcgaatccagggactcggcatcagacaagtccaagaagtccgagactgctgattcgtcgtccaagaagaccaaggccaagaagtccggcgataaggattccagcgctgctccgcaaccgcgccatgagaacaacacggcgtttacgatttccagcgccaacttcctgtcgaatcctggcggccaatccgggtacgcatactacatgcaccttgaccagccgcaggatgcgtaccgcatggttatcaccatccgcacatccggtggtaagggctatattcgcgcaaataccactggagaccccactcagggcgagcaggtggccgaattcacctttgctgaaggtggcactactgaggtgaagttcaccaaagccgtcaatacgcaggatctgctgctgtgggtgccatcgggtagcctgccgcagaaccagctgtacatcgagaaggtggaggtcttctaatcggcatctataccgataactgacccaagaagggcggtaccgttcgcatacattcgacggtgccgccctttcttcgcgtctggctgaatgacatggaatatcgtatgggggtgtgacaatgtttcacgtgaaacataacgtcatcattatcggttctggtcccgctggctacacggccgccatctatcttggccgtgcaggtcttaatcctgttatggtcactggtgcgttgtcgccaggtggacagttggtcaacaccactgaggtggagaacttccccggattcccggaaggtattcttggcccggatcttatggatcgcatgaaggaacaggccaagcgcttcggtacaacctatatcacagacgatgtctcttccattgaggcgtgtgagagtgattcggtcaagccgacctatcgtgtaacgctctccgatgactcccagttggaggcatcagcactcatcatcgccacagggtcgtcattccgtaagcttggggtgcccggcgaacaggagctgtccggacatggcgtctcgtactgcgccacctgcgatggcttcttcttcaggaacaagcctatcgtggtcgtaggcggtggcgattcggcttttgaagaggcattattcctgacccggttcggttcttcggtcaccttgattcaccgacgcgatagcttccgtgcctcgcagatcatggtggaccgagccaaagccaatccgaccatcaccctgctgaccaacacagtggtgacctccattaccggcacctcctcccccacacagaacaccggtgcacctattgccattcctggcttgacaatcaaacgaccggctgtggcaccggccagtgtcagcagcattgccgtacgtaacgtggtgaccggagaagaaagcacgctggacaccaacgccgtattcgtggctatcggccatacgccagccactgattttgcagctggtgttgtggaccgtgacaatgatgggtatgtcgtagtgcagggtgccagcacggtgaccagtgcgccaggcatctttgctgcaggcgattgcgtggatcgtacttatcgtcaggcaatcagcgcagcgggcatgggctgccgtgcagcgctggatgcgcaggcctatcttacggactgattgcggcgacctgatgatggcttgctgttctgactgctgcctgtgacataggagcagcgctaggtcagtgttacagcatgccgcccttggatagtacgcaccggtcaaaggcatagaaaggcccctcaggcgacggagaatcacgatgtgtgatttgtcatcctccagcctgaggggttttctattgcgacaggggctacaacgcaggcatacgcccctgccaggaatcacgcagaggctataacgtcttgcgcgtacaacgcactgcacagcaataatgccggcgacaacacgaatgttcttatcgtgttacacccatttggaatcggcatcgccttggctcggcaccagcagctgcaggatgcgatccatatcctctggtgacgagaagacgatttcgatgcgaccatgcttggtgctgcccttaatcgacaccttggtgtcgaaatgattttccaaactctgctggatggcggaaccaacccaaggattggtcttggacgtcttgggcttcttcggctgctcccccgacgcaatcttcatggcgacgatttcttcggtgctgcgtacagaaagaccttccgcaataatacgagaagccagcttgtccatttcctccggatcgctcaggcccaatagcgcacgcgcatgaccggacgatagcacaccggcagccactctcttttgcacagaggccggcaggttcagcagtcgcaaggtattggcgatttgcgggcgagacttggacaccgacttggacagttgtacttgtgtcaacccgaactcttcaatcatctgctggtaggcagccgcctcttccagtggattcaaggccacacggtgcaggttttccagcaatgcatcgcggagcatatcatcatccgcagtggttttgacgatggcgggaatcgtctccaacccagccaactgggatgcacgccaacgacgttcacccataatgagctcatacgggctgtccaaatgaccggcaaacggatttgtgctggattccgtctcgtcgtgcttggcggctttggccgcagcaatctggcttgccggacgcttgcgcacgactatcggttgcagcacaccaacttccttaatggaagcagacagctcattcaactcatcctcgtcgaagatggtacgaggctgatgtgtattgggcccgatatcagacagtttgagttcagccagataaccaccggctaccggcttgagctcgtccttcttatctgtgtcagcggtctttgccgccgatgcagtctgagatgtttcacgtgaaacatctttgacggtgacggatgtacgatgtgccgtctgagacgcagacggcttgccgccctgctgaggtgcggcgaccttaccggtttgaggtttctccgtaccgaaaaacaggtcgctaggatgagtaatggtgtccaatgcgggcatggatgcgcgtttaccggcggctttcttggctgctttactggacgataccatctgaggcgcggcaggctttgattcctgctgggcagtagccttcttggcgggggttatgtcagcagtggccgccggagtagacgaatcctcctcaatcattgcgggctgctccgccactggctcctcccctggcaatgtggggaacaaagcgccaaggcccttaccgagtcgtgattttgatgccattacttgttcctcctcgcatcaatggtgtcaaggacttgttgcgaacgctgtgcgatttccaaagctgcttcaccatacgatatggcacctatgccacgaggatcataggcaatcaccgattgggagaaactcggcgcttcggagatcttgactgaacgcgggatggtggtattcagcacaatgctgggatagtgtcccttgacctcgttatatacttcacggctcaatagcgttcggcgatcgaacattgtgacgagcatggtggacaccagcagtactggattgaaatgctcctgcaccaaaccaatcgtgttgatcagctggccaagaccctccaatgcgtaatactcagcctggataggaatcagcatctcggtcactgcacacatggcgttgatgaccaagaggcccaagctgggcgggcaatcaatgaacacgtaatcatagtgtttatctgattgacgcaggtagaggtccaaggcctccttcaacaatgtgtttcggttgggcagatcagccacttccaactcggcaccgctgagatcgattgatgcaggcacaacatcaagtgtgggaaaatcaggacagaccgtgataacatcacccagatcggaacgcccctcgataacgtcatagaccgagggctctcccgatgcatgagatacacccaacgccgtagaggcattgccctgcgggtccatatcgatgaccaacacctgcgcgcccttgttcgccagcgccgcagcggtgtttaccgtggatgtggttttacccactccccccttctggttggccacggcaatacgacgggtacgttgaggtttggggaaatcggttttcttgagtacatcgtagcgtgagctttcatcaaccatctggctgccaagcactgaaccgtgaccatcgaatattcgctgaagcgtttcggaagccgattctataggttccgactgatgatccttggtggacatcgctcctccttgcacagacgtaagttccagtgttctcattcgtatggacatgatgctcgttatccacaattgcgatatgcaatgtggataagtgtggataagtgtgaatgacgttgagtgttagattatgtattcgcagacgaaaaacattgaaaaatcagtgttttcatcattctgcacatcgtcccgtaaaaatgtggataacttttacgcacatatggaaatgtggataactcaatcagtactccactcatcgcttatccacaatcaccacgtgggtaggctcaagatccggtccgacagccgcctcaacgacgcgtggacgacgaccaccgaattttgcaatctccttgccagccttgtcgatttcagcctgagcagaccgtcccttcagtgcgatcaactgtcccgacggtttcagcaacggcaacgtccagccagagagtttggtcataggagcaaccgcacgacacgtgacaacagcgaacggatgaatttcccgcttccgtacctgctggatgacggcatcggagcgtccacggataatctcaacgttctgcagttgcatcaggtcaacacattcatgcaaccattcgattcgccgctccatcggttcaatcagcgtgaagtcatgatcagacaaacacgcggcagccaccaatccaggaaaaccaccaccactgccgacgtcggcaactgttttgaagcgaataccattcgtcacattccgaacgtacggcacaatcgcagcggaattcagaatatgccgttcccaaatgatatcgacgtcacgggggccgattaatccacgaggttcaccctcttcggcaatcttggcatggaaacgctccaacttcggcaacgcatcacccaagacctcagcaagtacaggtgacccctgcagctgatccgtcatagccatctccctcaccatgtttcacgtgaaacaatcaacatggaaaaggcgtcgctcattacgacgccattctccctacggtcactcttgtttgtttagagacgacatccgttgaacgtccttgtcatctcaaaaactcgtcgacctattactcctgatcaagctcgtcgtcttcggcaacatcctcgattttgttcttgagatacaccgtcacgtaacgatgaggctcctcaccgtgcgagcgagacttcagcccctcttcccgaaccacatcgtgaacgactttacgttcgaaggaattcatcggcttcaaatcatacggctcgccggaatccttcactgcgtcaatggcatccagggcgatatcacggaggtgctgacgcttgcgcttcaggaaaccgtcgacatccacaatcagatgagaacgctcgccggtcttctgctgtacagccagacgagtcaattgctgcagagcatcaacgacttcaccattatggccaataagatgtttgatgtcggtatcgtcatcagcaacgatttgcacggtggggcggtcattacgcacgcccatctcaatgtcgccctcatagtcggcgatatccagtaggccttcaaggtaatccgcggcgatgtcagcctcttcgttgagctgatcgatcgacttcacgtcatcctgtgccatacgctactccttcatgtcgtgtttgaattccaagtctaagccctgctcccccgaacagagaaagtaatgtcggtgcgtgttgaatgtttcacgtgaaacatcgaacgcgcaccgacatggtcgtcacttctttttgcgcttacg

SEQ ID NO: 3026 - DNA, 14302 bp, Unknown
  R19_24m  MAG No. k141_17488
gcgccgcgttcaggcctttgaccacgccgttcttgccctctccagacatcgaaccggagtaatcgaccacccaaatggtccagctgggtttcctgagcgcggtctggtagacgttgagcgcgctgtcgatcaccgtggcggaggtcatggagaacgtgagtttgccgtcgctgaccgcggcgaggatgtccgcggtggagacgggcttggtggcgccggtgtcgtcagcccagccgagtttgacggccttggatttggcgatgccgaacacgatcggcgtggtggaggtgctggccgcgtctttgacgatgtgcttggtgtctcccatcgaaatccacatcgaggaggcaggccagacggcgtcgtgatcctggccgccggccttgagcgcgttcataatctccagcgaacccatgtagtgcatcgtcacggctacgttggattggtcggccgctttctggatggcgacggcgacttccttgttttcggagccggaggcaatgctcagggtggcagtcggtttgccgccggacggctggaaggtctgcgtggtggcggacgtgccgttgccgtccgctgtgccgtcatcggaattattgaacgccgtgcaaccggtcaacgcgagcacgccggcacataccgcggccgcaaccgcggcggcggagagaagacattatgcccataattccatggctctcccgccatctaaagcgggccgggccacaaggtgaccgcacggtgaacaatgggtgaagagctacatcagtacgcggcgcaggcaatcatggggtcgtcgtagaagccgaggatcttttcgaggtagggcttgtaagtgctgttgggcatggagaagatttcgtggcgcgattcggggaagcgcacgatgttcgcctcgccgccgccgtccttgaccagttggacgaagtgattctgcggcttattgagtacccagatgtcgcgtccggactggaagagcagcaccggcgtctccacttcggcgcaggcggacgggttcagcacggcccggttgagcttcaacgcctggcgcacccattcgaacgccgcgcagtaggtctggtattcgctattctcgcaacgcagcttgaagtaccagcgttcacgcgcctcggaagcgccctcgttgccttccatcgagaactccggcgtgaagtccgactgcccgaacacacgcttcttgccgaagccgagtccgcacagcgcgccgaccagcacacgggccacgcccagcggcatgccggtggcgggggcgatcatcggggcggagagcaccgctttgtcgaacagggtggggtatcgctccaacacggccgcgccaatgccgccgcccatcgaatggcagaacaggttcagcggcatgccggctgcgtactgctggccgatggtttcggcgaagccggccagatcggccacgtagcgctgccagtcatcaatccacaccatgcaatgatcgtccacgtcgcgcgcggacttgccgtggccgcgatgttcgagcacgcacaccgaatagccggcgagcaggaagtaccagaccagttcgtcgtacttctcggcgaactcggtgaagccgtggctgatgacgatggccccgcggaagacggcggtggcgccttgttcgcggatcgcgtcgaacctggcggcgtcatagcacaggtagtgcagctgtcccgaacggccgccggtgtccataatgccggacagcggctcgaccccggccgaacgttcggcggcggacggatcgaaccagccctcctcgcggcattgctcgagcgcgggcagcaccacgtcggccatcgtttcggcgtacttgttctcgtcgatcatcgtcacctgcatggttcccatcttaggacaagcctcacgccgctgaccgcacaggcgcgtaggttgtgaggtatgagcgaaaccaatgatgtcaatgacgcaatcaagcatttcccacgcctcagggcgcgcacgctgcgcttcggctgcggcgcgccgcgctccgcacagaccgtgggcgacggctcgcgggccctgttcctgcgctccgacggccccgaggatctggtgaccgcactgtggctaagctggttcgacgagtccggcgaacaccatgagaccaagctggccgatccgcgcgaactgcttggcgcaaccgccgacagcgaggacgtgccggccgaggagaaggcccgccgcgagcgtgcgcgcgagggcggcaccggcatcgtcggctattccgcagacgatgacggcaatcgcatcgtgttcaccatcaacggccgcctgttcctgaccgagatcgcctggaatgacgagaccggcgcacccgagccgcacacccgcgaactggccggcgaatggctcgatgaggacccggagatgtacacgccggtgctgaacccgcgcatcgccccggatggcgagcatgtgctgtacaccacgggcagctacctgatgctggtcgatatcggcggcgagctgggtgaccgcatcaccgcggtctacggcgtgagcgtggaggatgaggacggcaatccggccgaaaacacgtggaaaatcggtctggccgagttcgtggccggcgaggagatggaccgttacgacggtttctggtgggccccggattcgcagcatgtgctgttcgaatccttcgacaccgccgacgagccgacctggtacatcagcgatccggccgatcccgagaagccggccgccggccgccgctacccgcgcgcgctgacccgcaacgccgacgtgtacctgaccgtgatcacgctggcgttcgatgagaacgaccggtacgcgggcatcaccggcaacgccgatgtggattgggatcgcgaggcgtacgagtatgtggccgccgtgagctggcgtcgcggccacgatccgctggtgctggtgcagaaccgccgccagacccgcgaccaggtgctcgaggtggcggtcgcggcggatggggccgcgctgggcgccacgcgtgtgcttgaggagcacgcgaacgagcagtggatcgacttggttcacggcacgcccgcctacacgccggatgatcgtctggtgtgctcgctcaacgatatggccacggataccaaccgtctgacggtggacggccgaccgttcacgccggctggctggaacgtgcgcacggtgctcgacgtgaccgacgaggatgtgctggccgtggtgcagcgtgcgcccgaaatcgcgaccgaggtgccgcgcgcctgggccggctcgggtgccgcttcggatgccgagtctctgttcggcggccatgacgcccgcagcttcgatgtggtgagcatgggatatgacggctcggtcgcgccgatcacgaccgagcccggtcagtggacggcctcacgcggcgcacgcggcatggtggtgtctgggcgcgatatgcgttccgcccgcgcccggatgcggcacatcgtcacgcgacgcgccgtcggcggcgtcaccgatgccgtcatcgccgccaacaccagcgatgccgccaacaccaccgacatcaccgccgccgacatcaccagcaccgccgcggaacccgggttcacgccgaacgtcacgttcacgcggctgggcgagcaccggttgtacacggcgatcatcgcgccgagcccgtccagcccgtacgcccatgccgacaaactgccggtgctgatgaagccgtacggcgggcccggcttccagcaggtcgtcgcctcccagtccttctactgggagggccagtggtgggccgaccagggcttcctggtggtcacggcggacggccgtggcaccacaggccgcggcccggcctgggatcgcgcaatcttcgagaacatgaagggcgtgacgctggccgatcagatcgaagccgtcaacgcccttcccgaggccgtctccaggctcaacgccgatgggcgcaggcccggcgttcccgcaccggacctcgacaaggtgtgtatgatcggctggtcgtacggcggcttcctgtccgcactggccgtgctggacgcgccgaacgtgttcaaggccgcgtgcgccggcgccccgcccaccgactggacgctgtacgacacgcattacaccgagcgctatctgggcctcgacccggatgtctactaccgcaacggcatcgtgcaggacgcaccgaaactcgagcgcccgcttatgctgatccacggtttcgccgacgacaacgtcaccatcgcccatagcctgcgcctctcgcaagccctgatggcggcgggtcgcccgcacaccttcctgccgttgacgggcatcacccatatgaccaacgacgagaccgtagccgaaaacctgctcaccctccagcgcgacttcctgcgcgacgccctggcctgaccggccccgggcgcgccgtgggccgtgacgtccgcggcacgcccggggcccgcgcccacacggcatgcggaaaaacggcgcaggtggtgcgtcgcacccatttccgccctgaatttttggatatttttggatattttgcacccatcgtcatgtgaaagaccggttttttgcctcatattcccatcaccgcgtaggatgggtgaggattagaaagggaggactatgagcgttctcgaccgttttgaaaaaagcgtggagggtgcagtcaacggagtattcgccaagtttggctccaaagacctgcagcctgtcgatctttccagcgccttggagcgcgagattgacgccgaggccatgcccgtgggccgtgaccgcacggtggccccgaatgaataccgtttcaagctcagtactcctgacttcgaccgtatcgaggcatggggtagcgagaccctggccaacgaactggccgataacctcaccgagtacgcgaagagccagcattacgccttcgtgggcccggtgatcgtgatcttcgaggaagaccttgacctgtccaagggcaacttcaacctcacctccgaatccgtgcagggcaatgccgtgccggtcaccaccgatgcgcagaccgaggacagcccggtgctcgaggtgaacggcaaccagtacctgctcaccaaagacaagacggtaatcggccgcggttccggctgcgatatcgtcatcgacgatccgggcatctcccgcaagcacctggaaatcgacatcacggataacggcgtgatcgcccgcgacctgggttcgaccaacggcacgtacgtggagggccaccaagtgcccgccgccacgctgctcgatggcaacaccatcaccatcggccgcacccgcatcctgtactgggcctccgcccaagcccaggagtagtcgagcacacgcccgaaagccgcccacccatgaccgaactgacattcgccctgctcaagtatggattcctgatcctgctgtggatattcatctggctggccgtgcgttcgctgcgcaaggacatcgagacgttcagtccgcgaccttcgcgcgcacgccgccgccgtgagcgtgaagtgcataaggccaaggccgaaacgccacaggcagctgcgccgcgcccgcatcgccggcccagcgcttccgcgtcgtccgtcgcctcggcgcagcctaccctgttggtcatcatcgatggtccgcttgccggcagctccgtgccgctggccgaagccgacatcgcgcttggccgcgccgcctcgaacaccgtggtgctcgatgacgaattcgtgtcttcccaccatgcccgcgtctaccgtgacacgcgctccgggcagtgggccattgaagacctgaactccaccaatggcaccgtggtcaaccagcagcgcatcaaccgccccaccatcctgcccgctcgtattcctgtgcgcatcggtgccaccaccttcgaactgaggtagccgcatgccaaaatccgccgcttcacaaccgctgttcctgtattccaccacggtgtccgatgtgggcactgtgcgcgcgaacaatcaggattcctccttcgccggcgagcatctcatcgccatgtgcgacggcatgggcggtcacgccggcggcgatacggcatcctccatcgccatccggtcactggcccacatcgagcaggacgacaccggcggcaacgtcgagacgatctcccgcatgatggaaacctccgttatggccgcgcatgacgccatcgtcggcaaggccaagcgcgaacgcaagcttgccggcatgggcaccaccgttaccgcagtggcattggtggccggctactgggtcatcgcccatatcggcgattcgcgcgcctacctgctgcgcgacggacgcctgagccgcatcacgtgcgaccacagctacgtgcagcacctcatcaacaccggtcgtatcaccccgtccgaagccaagaaccacccgcagcgcaacgtcgtgatgcgcgtgcttggcgactttgacattgacccgcgcccggatatttcggttcgccgagcccaccccgccgaccgttggctgctgtgctcggacggcctgtgcggtgtgctggaagattccaccatcgaagagacgatgaccacgctgtccgatcagggcgaatgcgcgcagcgtctggtgcagatggcactgcgggcaggcagcaccgataatgtcacggccgttattgcggatgccacgttggcgttggatgccgatgcgttcgacctgccgcaccaaacgccgttggtcggcggtgccgccagccgtaatcttgagccgattgccgacatcgtcaacgagccggtggctaccgcgcccgcactgcgtgaggatgattcccccgcccagcgcgccgcagcattgattcagcccgccagcgcgcacgaggcggagaccgcgcaaaccacggccaaaccgtcgtccacacgcgtggtgcagccgtccaccgtccgcgaggagaccggtgaacgagccaatcccgataccggtgagattccggtggtgcaaaagccggatgggcgcctgtccgccgaccccaacgacccggatgtggccaaagccatccgcgatgagcaggtcgagcagaagaaggccacgcgcaccaagaagcgccgcaataagcttgcggtgattattacctgcattcttgccgtgctggccttggccggcgctggctggggcgtgtacacgtggagccagacgcactactacgtgggagatagcaacggcaccgtggccatttatcgtggcgtgccgaccaatctctttggacttgagctttcgcacgaagtgcagaccaccaatatcgccaccgcggacctgcctcagacatggcgtgaccagctgagccaaggcatcacagtcggttcgttggacgaagcgcagtcgcatgtgggtattatccgcaccgaaatgcgcaaactggccaagcagcaggaagccgacgccgccaagaaggccgaggcgtccaattccccggacagttccaaagacagctcccagagcgattccaaggacagcaccgaggattcgtccagccagtccggctcctcgtcagacaagtccggttcgtcaagctcatccgattcctcggataaatccggtatcggagcggccgacaacgcggccacgggagattctcaatgatcgttacccgtctacgtcagatttctttgttgctgattgccatggcaatcagtgcgttggcgttcatccagatgttccagcgcaccgccggcgaattccctatgcaatacgccggcatgctggcattggccgtagtgctgtttctggtgctgtgggggctgattgtgcgcttccagccgtacgccagccagtcgattctgccttgcgtgctactgctgaccgccaccggcgtgaccatgatcgctcgcatcgaccagagcgaaggttgggcggttgcccaacgtcagctgatctggctgtgcatcgccatcgtgctttccgcgctgctcatcatcttcctgaaggactaccgcgtgctgcggcgcttctcctacgtgtcgatggtggtgggcttggtgctgctgctcgccccgatgctgccgtttgtcggtcaggaagtgaacggcgcgcgcatttggatcaggattccgggactgggccagttccagccgggcgagttcgccaagctgttccttgcgttcttcttcgccgcctacctgttcgaccatcgcgaccagctggccgtgggcggtaagaagatgctcggtctgcagctgccgcgtatcaaggatctcggcccgatcatcgtggtgtggatcgcctcgatgggcgtgctcatcatgcagcatgatctgggcacctcgcttatgttcttcgccatgttcgtggccatgctgtacacggccaccggccgtaaaagctggatcatcatcggtctgatcgcgttcgccgcgggtgccgtgctggccgcaggcatgttcagccacgtgggtcagcgagtcgatgcctggctgcacccgttcagcaacgagcaatacaacaagacccccggcggctcctggcagctggtcaccggcattttcggcctggcatcaggcggcatgctcggcaccggtctcggccaaggccatccttcgctcgttacgtttgcgaactccgatttcatctacgcctctctgggcgaggaactcggtctgatgggcgtcctggccattttgatgctctacctgctcatcattgcctccggcttcatcaccgccatgaaaatcaaggatggcttcggcaagctgctcgcttccggactggtgttcaccatggccttccaagtgttcaccgtggtcggcggcatcacgctggtgattcctctgaccggtctgaccctgccctatatggcggccggcggctccagtctgatcgccaactatattctcgcgaccctgctcatcatcatctcgaactcggccaatgcgcccgagccggagctgacctcggatacgttccagtacgaggctttggccgtgctgcgcaacaaggaacttgaggcccgagcccgcgccactgagccgatcgttcagcctcgcagcgcgtcggctacggcgtcgcagtccgaggcggaatcgtttgacgaccccattgtggatgccaccactccggcgtatgccggcgccgatgaaccgtacacgcctaccggtacgattcccccgcttcctcccgttaacggaggcactcgcgtatgaacaaatatcttcgtcagcttttcaccgccgtggtcgcgctgttcgtgattctcggcctgtcgtccaccatcatcatggcggtacgggccaacgcgctgaacaacgatccgcgcaacgcccgttcgctgtaccaccagctcggtgcctaccgcggtgccattctggcctcggacggcacggtcatggccaaatccgaaccggtcaacgacgcgttcaaatacctgcgcacctattccaacggtccgctgtatgctccggtcaccggcttcttctccatcaaccagaccgccgatcgcggcctggaagcctcccgcagcatgctgctcaacggtgaggccgattcattgatctggcagcgggccaaggccatgctcaccggcactacgaatcagggcgcgtccatcgaaacctccatcgaccccaagctgcagcaggttgcctacgatcagctcggtacgcgcgatggtgcggcggtggccatcgaagtcaacaccggccgtatcctcgccatggtgagcacgcccagctacgatccgaacaaactggcgacccatgacgccaaagccgcgtctcagtcctacaacgaactctctgcgggccaaaatcaaaatagcccgctaatcaaccgcgccacctcgcagctgtacccgccagggtccacgttcaagaccatcgtcgcctcggctgcgctggaaaccggcgattatcagacggacacgaagattcctgcaggctccagctataccttgccgggaaccgccacacagctgccgaacgacgaggcacagggcgatggcgtcaacggacagatctccctgcaagaggccgtcgcatggtcgtccaacaccgctttcgcccagcttggcgtgaaactcggcgcgagcaaggtttcggacatggccaccaagctcgggttcggcagcaccatcaccattgacggcaccgaatccacgggcaccccgatgacggccaccgcgtccacattcccctctgatccgaccgacgacaagcttgcgctggcatccatcggccaaggcgacaccacggccacgccgttgcagatggcgatggtcgcgcaggcaatcgccaacaatggcaaactgatgcagcccacgctggtcgatcgtgtgcgcgccgccgatctcaccgtactttcgcagaccaaaccgcaaaccatggccaacgcgttcagcaaggattccgcagacaagctcaccacgatgatggagagcgtggtgaccgaggccaatccgcagctggccatcgacggcatcaaggtggcggccaaaaccggtaccgcacaaatcggtatcgacaactctgccatcgacggctgggcgatcggtttcgcgccggcggacaatccgcaaatcgccgtcgcggtgttggtgcataacacagatgtacacggttcgctcgccgctggcccgatcatgcgcgcgatgatgcaggaggctttgcaacagtgaaacttatcgaaggacagcttattcaccgccgatatcgtcttgattcgcgtcttgcgcaaggcggtatgggcgaggtctggaaaggctacgatattcagctcggccgtgaagtggccatcaaggcgctgcgctcggacatgaccaacgccgaggccaagctacgccgtctgcgtgccgaagcccataattccgccaatctggcgcatccgaatatcgctgcgttgttcgaatactacgagcatgacggcatcggctttctgattatggaatacgtcccctcgaaatcgttggcggatctgttccatagcaagggcgcgatggatcccatcgaactgctgcccattctgattcagaccgcgcgaggcctattcgtggcccactcgcacggcgtgattcatcgtgacgtcaagccggccaacatcatggtttccgacaccggcgaagtgaagatcaccgatttcggcgtgagctactccaccggccaaggccagatcacccaggacggcatggtggtgggcaccgcacaatacatctcccccgagcaggcgcagggccagcaggccacgccgcaatcggacatctattcactgggcgtagtggcgtacgagggccttgccgggcatcgtccgttcaccggcaccactccggtcgatatcgccgcagcgcacgtgaacaatcccgtgcctccgctgccgaactcggtggacgtccagttacgcgaatttgtcatgtcgatgctggccaaggacccgttggatcgcccgaaagacgcgctggtggtgtcccgtacgctggcacgcatcgaacgccgtctgctggatcagcagaccgaaatggccgacaccaccatggccacgtccggcaatcgactgccgcgccgagtgaccagcacgccacgcattgttttggaggccccggcctcaagattgggagggaataagcaatgagcaccagtatgcccaccgcattggccggcggacgctaccagcttggccagctcatcggtcgtggcggcatggccgaggtccacgtggctcttgacacccgtctgggccgtaccgtggccgtgaaaatcatgcgcgccgatctggccaacgacgacatcttcctggcccgtttccgccgcgaagcacacgccgtggcccagatgaacaacccgaacatcgtgaacatctacgattcgggcgaagaactggtttcttccgaaagcggcgataccgagcgtttgccgtacatcgtcatggaatacgtcaagggccagaccctgcgcgacatcatcaaggtcaacggcgcactcagccagcgcgactgcgaacaggtgatgttgggcgtgcttaacgcgctcgactattcgcatcgcatgggcattatccaccgcgatatcaagcccggcaacatcatgatttccgagcagggcgcggtcaaggtcatggacttcggcatcgcccgcgctctggacgattccgcaaccaccatgacccagtcgcagggcgtggtgggcaccgcacagtacctttctcccgagcaggcgcgcggcgagaccgtcgacatgcgttccgacctgtattccgccggctgcgtgctctacgagatgcttaccgggcgcccgccgtttaccggcgattccgctgtggccatcgcctaccagcatgtctccgaagtcgccacgccgccatccgccgtggtgccggggctgccgaagatgtgggattcaatctgcgccaaggccatggccaaggaccgccagaaccgctacgccacggcctccgaattcaagaccgacatcctgacctacatgaacggcggcgtgccggtggcggccgcgttcaacccattgacggacctgtcgaatatgaaggcccgcaaggaagccgaacgtgatttgcccaccacgccggtggaaccgcagcagcagcccacccaggcattcaacccggtgaccggtcagttcgagcagattccaccggccaatggtgccaactcagcggcgttgcagtcccgtgcgcagcagcgtgcggcggcggccaaggccaagaagcgcaagaagatcatcatcggttcggcgatcgcggcgattgtcgcggtgctcgtcattgtgggcatcatgttcgccatgaacggctccggcaacaagtcctctgaagacaccgtcaccatccctgaagtgtgcaacgcttccacgtccaaggacaacatcaagctcaagcttgagagattgggcttgaagatgaccgaaaagcaagacaccgactccaccgagccggaaggcacctgcaccaagatgagcccggacgccggctccaaggtggccaggggatctgccgtgaaggtgtggttctccgcaggcccgcagtccactcaggttccggatgtcaaggagcgcagccaggaagaggcgcgcagcattctggaaagcgccgggttcaaggtgaacgccaccgtcaaaaccgaagacagcgccgacatcgccaaggatatggtgacgagaaccgatcctgccgccggtcagtcggttcccaagggcaccaccatcaccatatatgtttcttccggcatgaccaccgtaccgagcaatttggtcggtcagtcgaaggacagcgtgctacagcagtatgagggcaagttcagcttcaccgtggagcaggaaagctccgatacggtggaggccggtctgattacccgcgtaagccccgattcgggctcttccatcgcgcagggcgggtccatcaccatctgggtgtccacgggcaaggaaaaggtcgctgtaccgaatatcaccgctggcactgactacgccaccgccgaactcatgctcaaggccgtgggcctcaaggctcaggccagtggcccaaccgacagcaccgctgtggtagtcagcatcaatcctggcgctggcagccaagtagatgcgggatcgaccgtcaccattaccacgaaggccggcagcaccggaggcgacaccggtaccggagacggtggcaacggcaacggtgccaacaacggcaacggggggcggaacccgtgagtgagtgagcgccgggcgtgtgtgttgcgcatacgcaacgcacatagcgcaacacatgcgcaacacatgcgcaacgtaaacacgcaacgcaatcacacaacgcaaaggggaggggcttctgcacccctcccctttgctgtataaagagctatcccagcgcaacattccagggaaagcgtcgccgcgcgcggaaaagctacttcgtaaccttgggctgaaggccggcggacttggccacggcgttgtcttggccgcagaccttaagccagttggccagcagacggtagccgtcctgggtcatcacggattcgggatggaattgcacggcgtacatcggcttgcccttgaccttgatgccctgaataatgtggtcgccctgcgtccacgcggtaaccaccagcgtatccggcaccgaatcgggctcgacggccaacgaatggtagcgggtggcggtcatggggttggccacgccctcgaaaatctcgtcatcgatatgttccaccaagctggtcttgccatgcatgatggtgggcgcatggcccacagtgcagccatacacctcggcgagcgcctgcaagcccaggcacacaccaaacatcggcacgccgctggccgcgcacaggcgaatcatatcctcactggcaccggattcggccggagcaccagggccgggagaaatcagcacgccatcgtaaccgtccagtacaccc

SEQ ID NO: 3027 - DNA, 26430 bp, Unknown
  R19_24m  MAG No. k141_17807
caacagggtgccttcggagcgggcgatgttgtatcgggtgatgtatccggtgaagtcggaggcggtttccaccatgtcgcgcaccacggatttcggcgacagccagtagtcgttggcccacggcacatcgtggcggtactgatcgaacgcggcttcgagcatgtcttccagtggcttcggatacgtaatctcctgcagcttatccatacgctcgtcatagtcgagtccgtcggccttcatatcggccatcgccttgtctcgggcctgacgctcctgggcacgcagcacctgcttggggtcttcgagcgtggcctcggccatggagatcacgtccagcgcataggtgtcggactcggggtcgagcagttcgagcgcggccagcaggaacggggagagcggctggtcgagggcgaagtcgtccggcatatcaagggtcatgtagtagtccttgccgccgtccttgcggtcctcggtttcgatgacttcggtatcgaacagggtttggaagatctcgtcggcccgctggtgcagatgctccttctggtcgggggtctgcgcggaatcgtcgatgagatcgtcgatacgggcacgggcgtcaccgccctgcgccacttcattgagcaccatcgaatgcgtgattttcaggtgcgggaccagggtctccggttcagcgtcgatgagcttatcaaacgtgctctggttccaggtcacaaaaccttccggcgccttcttgcgcttgaccttcttgagtttcttcggatctcccccggccttggcgatggctttctggttttcgatttcatattcgggagcctcggcgatcaccagtccctcggtatcgaatcccatacggccagctcgtccggcaatctggtggaattcgcgggcgcgcaggcggcgcatcttggtgccgtcgaacttggtcagggccgtgagcaccacggagtgaatcggcacattgatgccgacgcccaatgtatcggtgccgcaaatcaccggcagcagaccctgctgggcgagctgttcgaccaggcggcggtagcgaggcagcatgccggcatgatggatgccgacaccggtgcgcagcagtcgctgcagaatcttgccgaaggctgtggtgaacttgacgcctttgatggcttctgcgatggcttggcgctgttccttgctggatacaccggtggaggcgagcgcttgcgcggtctccaatgcggcgtcctgcgaaaagtggaccacgtaaatcggggtttcgccgttgcggaaggcgagttccacggttttttccatcgggtcgagcgtgtattcgtagctcaacggcaccggtcgcggcgcgtcggcgattacatccacgtccggggtgtcgttcagatcggagagcttgtcggcgatggcgtccacattgccgagtgtggcgctcatcagcaggaactgggtctgcggcagcgtgagcagtggcacctgccacgcccagccgcgctccggatcaccgtaataatggaattcgtccatcgccacgaggcccacatcggcatgggtgccttcgcgcaaagcctgattggcgaggatttcggcggtgcagcagatgatcggcgcgtccgcgttgatgtggctgtcgccggtgatcatgccgacattgtcgcggccgaacacttcgaccaagtcgaagaatttctccgacaccagcgccttgatcggagcggtgtaataggagcggcggccagtgcatagggcggcgaagtgcatgccgagcgccaccagcgatttgcccgaaccggtcggggtattcaaaatcacatggtcgccggccaagaggtccataatggcctcttcctgatgcggccacggctcgatgcccttgacgtcttccacccagccgaagaaccgttcgtagatgtcgtcggccgtaagattccgttcgcgtccgtcgccgtcccattcgggggccagccgccccagggatccgtattccttctcgtcagtcataatgctcagtctacctagtggcctattccgacggcacgagccgccctccgtcgctatgcgacgcctcccgccagcgggcggagccatgcgaagagctgtgccatgcacttggctccgccaatgggaggatcgctcacgccaaccggcggcgcacctcgtcggggtccacctcgggttcgaggggaggccaggtcatgttcatgttcttcaaggtggtgcgcagcagttcggagaccacggctcgcgaataccagcggttatcggccggaacgaggtaccacggtgcggcggccgtgctggttttctcgaacacttcctgccaagcgaacatgtactcatcccatcggtcgcgggcctcgaggtcggagatatcgaatttccagaacttggtgggatcatccagcctcccaagaaagtgttttttctgttcttcctggcttaccacgaggaagatcttgaggatggcgcatccgctggcggccagttcacgttcgaaatcgttgatctggtcgtagcgggcacgccatacgtcttcgggataggtgccatagacgtgcggcatgaccacatcttcataatgggagcggtcgaatacggcaatccaccccggcttgggcaattcacgcttcacacgccagaggaagtcgtggtcgagctcctcggccgtaggcttgccgaagccatggtaatggatgcccatcgggtcgccttggctgaacacgtggcgcacaatgccgcccttgccggaggcatccatgccttgcagcacgatgagcagccgccgtgccgagcctttgacgccattcgcgtacatgagccgctggtatcgggcgatttcggaggagctgatcgaaatgaacttctcggcgtcctctttattgccgtcgaatccgggagtggaatcgccttcgacatcagtgacctgcatgccgtggtggaacataagacgttgagcgggcggcaacgaccatacggcgctgagcagttcactggatttcgccgcacgcgccagtcgttcaggcacgctggcactggagtcgatggtgtctatgcgatccaccgcgagctgtaataccttgtcgatccgtcgatcggttttggattcctttcccttgccgttcttgttgttctttcctgaggattttccggccgtaccccacttgccggcctcttcaggctcgttggttctgtcgtcgtccttggtcatgctcccgattgtacgtcttgtaactcaggagacctagcaacgtagcgacattcacatttcgcctgttactgcaaatctataggcatgcagtcgttcggaccgtaattgttggctttgcaccaattccaagcctcatctgtcgagtcgaagccctcaccggcaagaatcacatagtatttgtcggaattgctgctgtaggcgggccagtcacccgaccagataagcagtacgtttgaattcttgttgtgcatcgtgatgaattgcgcaagaatatcgcggtagttccaggtcttgccttcagcctccatacccttacgcttgctggacagctgtgcggtatacgtggaatagaacagctctgcggagtccttgtcgtgctcgacctgccaatccaatgccttgcttgcattattttcggcttcgtcatccgtaacgttgctgccgcttatcacgcctggatcagacgatccccagcaatatcttctttccggcagacccaccggaacgcggctgcgcagcgccaccgttgcctggcgccgtcgacaatgccgaagtaggtgcggtcgccgtgttgaaacttgggggcagcggcatcgaacccactggcacctgctggggagcagccggtaccagcgtcgggccatccatcgactgaggacttgggcttggcgcagactgtgccatcggcgcaccgcattccgtgcagaatcggcttccctccggcatctccgttccacatacctggcacttcatactctctccgttctctctcatccctatcggccaatcccccgtccgtctgcagtacataaagaagcggcaaacggcccgaaacatacctgagctatcaggaagacggcacgatctgctacgagaaagagatcatcaccgaccggcaaatcgtcggcatcatgctgaagcatccgaccagcgcacgcggcttcaagcgctacttgcgcgccgcatcatgacgcttgaccacgatggtgacgccacccgcagcgaacagcgtcgccagaaccacaaccaacgcaaccgaggcaccggtattggccgtatgttcggtctgctgtggcttggtgctgccattggcattgacgctaccgctatggttgccgttatccttgtcgtccgtcccggtggacactccggtaacggcaacgggcagagcgaccgtggtcttattggtcgcaccggtcactgtcaggcttatatcaccggtcttggttccggcgggaatcgtgaccttgagctcggcggtatcgccattcgcaacctgtgcttcgccgaccatctgctcgccgatggtggcggtcagcttcgtctcgtcaggcacgcccagcgaggtgagcgtgagcttcgagaagtgcagggtgaacgagccaccggccttgaccgcaccggtcgggataccggtgacggccactgcacggcggtcgtagcgcggggcaaccggatcgttgtccttgagatagtcgatccaggcgtcgcggtccaccaaaccggtgtccttggtgttcgtgccttgggcgaaggcgcggaagttatcgccgccctccaacaggaagctgaacgaaccgatacggtagttgcgtttcaggtccagaggctcaccgttgacggtcaccgaggtgatgtgatggccttgcgcggcatccggatcatacgtgtagctcacgttgtgggacagtccgagttgcagatacgcgcgcgatggcgtgctgccgtccgcgttcgtctgccactgctgttccagcgcttccttgaactgcgcgccggtaagcgtggtggtccacaggttgttcaggaacggcagtacagcgttggcctgggcgtaggcgatattgccgtcggcatcgagcgtgcaggcgtcattggtgccggacttgcagaattcggcacgcagaccgccggggttgaccacaccgatttcggccgcgccgcggtcctcgcctttgagcgaatcgagcagcgcatcggccaccagattgcccatggtcgattcggaggcgcggtcgtcacgcttgccgtccttgaatgcggtggtgatatccgcagacaccttgccgaccttctcgccgcccttttcatcggccaccttaagggcctggtacacgatgtccttcaccttggcgacagtcggattcgcggcggcgagcaggccatcgttgtattcggcgtaatcgttgtagtgcggatcatttttgtcggcgggctgcgaagccacctgcacggccgtgttgccggacttgtcgtaagacaccgcaccggtggccgtattgtaggtgagcaccacttggccgatgttggcggcatagctaccggtctggatgatcggccggttgttgtgcgcgggatcggtgtacgagtacttcatgtgggtgtgtgcagtgaagatcacgttcactgccgcatcggtatcgtccacgatcttcttgaacacggggctggcggccttctgctcgtcaagtgtgggcttggcggtggcgtcatcttcattggaggctgcaccctcatggtattcggccacaatcacgtcagcctcgccattggattcgtcaccgtcggtgagctgcttggccacacggttcacggcttccaccggatcgccgaattcgatgtccttgacaccaccgggagccaccaatgtgccggtttcctgagtgaccgcaccgatgatgccgaccttcacgccgttcacttcctgaatactgtactcgggcagagccggggttgtggtgcccttcttgtacacgttggcaccgaggtaatcccattgggcgttgcgcgcgccctccttgccaatcacacgatcggtaaggtcggcatagccttgatcgaactcgtggttgcccaccgccgaagccttgacgcccaaagcattgagtacatcgatggtcggctggtcctgctgtaccgaagagttgaacagcgaagcaccgatattatcgccggcggacagcagcagtgatgagtcagggtattcgcccttgagctgctcgatggtggcggcgaacggcacggtgaggttcttgtcgatacggccgtggaagtcgttgaagttcagcagattgatggtggtgctggcgggaaccggctgattggttgccatatagcccatacgcaatgaatggccattggtcacgccgtcgtctgcccagaacaccggcttgtacaccttgccatttactaccttggtggcttcggtatcaggggtgatggcaaaaccttcggtgttctgcgtacggatttcatccggagtgtcggtcagcttggtcagctgcagcacaccgttcttgaattcgtaggtgccgattttggcaccggtgttcgcgtcattgtcgctttgggcgagcagctggttgtgctcggcgtcccaagtcagatcgcgcgggccatcatagccggcgttcaccgcggactgcggcaggtcgatgtcggccaccggatgcaccaggtcctcatcattcacggtttgcagtgcgaaagcgtagatatggccggttttctccagtgcggcgaagaacagaccgccgaaatcattgccgaaaccgtccgggtcgtaggtcattacgttcttcgggtcaaggttggactggaatccgttggcggtcaggaccgagtcgggaataaaggctatgccttccaccccaagattggcgtccgctccgtggcccagcgtcacgccgaactgcgtgagtgctgcggtgagattccactcgtgcgtagcggtcagctcttgcgctccgtcgccgttggcgtcggtggttttcgcggtcacgtcatactgcaggatggaaggccgcggcacattcttgttttcgttgtcgcgctcggcgccgatgaatatgcccttggatgaatctccgttgatcagcgtgatgccttcggagtccacaccgcccttgccgtccttgaagtgcagctgcttgccgcccttggtctgaccgttgttggtgaaggtccagccatcagtgggatcctgctgccatgtgccgttctggtagacgaacttgttgatggagccagggcccttatcagcggtgttgccgagcgtggggttcagatcgttgtcggccgcccacagcacgccttgcttgccgtctttaccggcttcatacaccagaccagacagattgccgtcagtgtggtcgccgccttgtcctttggcgccaaattcgccttcggcatccactgtggtcacatcggccaatcccgaccatgcgtccacggtcatggtctcgccggcgggcggagtcggagtcgggtcatcgaacacgttctgtgcaccgggcgtgggcgtatcggaaagcgcgaaagtgccatcgtccttacgggaccacgactgactgtcgctcatcttcttcacgccggttgtatcggtattccatgacgtggaatccaccacatcgctatcggtaaagtcgccgctggtagtggtcagataggcttcgtcggcatcggaacccaggccgggctcggccttgtcggggtcgatgtatgccaccagatatccgccggctttgatgacggtgtccgtattcgttacttcgctggtgccgatggtgtagtgcttcttggctttcttgccgctgtcgtagatgccccagcccttcacgtcaacgtctgtggagccggtgttcttgagctcgacccaatcgcaacgcttgctatccgggtctccggcagctttcgtattgccggcatagacctcgttgatgattacggatggtttggcagccgtgttctgttcggcagtggcctgctgctcgtccgcagccgcagcgggcacgccgatcagggcgatgctgctcagtgtcaccgcagcggtgagcagcgcgatggcgcgccgcgacatcgcggtgaaattgttggtgtggaacattactcccgttccttcctcgggttgtgccgccgcagcatgatgctcttcggcggatgacaccccgagggtatgagagagaaatgaagccgacaccgtatgaaggcaaactcggcagatctccaaactgaactttggctgaattaccgctgaagctggttcttggatttgcgtcgaaccgtccgtattccgccgacaatcgcgattacagcggtaccgatggctacgctgatcaacgccggtcgttgcgcggcatggagggtggcgagatccggcccggccgcaatggcgctgttttcacccgccgagccatcagacgccggatgattacccgcgtcggcgtactgggcattgaccacactcgggccggtaagcgccacctggtcggcggtctcgaccttggccacatcgccgtgcttatccaaggtgacgcgggcgcacagggctttggcccagttgatacgctgccagccgtcgctcgattgccatagggggtatccggaatccaaggcagtggctttcaaaatcgcgttgcgctgatcggcgtgcagttcgggataggccagtcgcagcacgtccgccgccccgcgcggtgccacgaaatcagcgccggactgggcggtgtcttgcgggaaggtgtaggtcaggcgtgcggtgtagacgcgcacggccgaggcctggtccgcgaccggctcggtggccaccgggtccagaaaatcgttggtgtagccgcccgaaccggaggccttggtgttggcgatgcaggcggcgagggtagtgccgtggccgtccgcggcgcagcgggacaccagatagtcccgcagctgccgggacgcgggcacgatggacgaagcgaattcgttatgccagtactgcccgttctgggcggatgcgccaatgcgcccgcccatgatgtcaagcggataatgcacgccgagcacgatgcggttgttgccggcctccgaagtgcgggccatgatttgcggcgcgagttcgggaatcatgccggccagcgcgataccccacgaataggcgccggtagtgtggccggaggggtaggaactgtttttctgcaagttcgagtagccgggcacgtgttcgagccatgagggtgattgcttgatgtcaagcgtggcgggcagtccggcgagatcgttagtgccgccgtagctgctttccgcacggttcagataggggcgcggatgcatggccgcacgttttgaggcgtaggtggaggccacattaaaggagaagatatcggcgacggcgttgagtttcccggatttgagcccttcgctcatatatttgccaagcaccggaccgagcgcgtccggcatggcttcctcggcttgcagatcggagtcgacgagcgcacgcttgcgttgggcgttcaggccatccttatcgagattttcggcggctttgtggttaatggccacggccaaatcttcgtcgagtttcattgtatcggcgtcgagcaccttgccaccgtgctcggcatcggtgggggcctgccaatagttcttttcgtagtcggagagcaatgccacccaatccgggttgggcagctggtcggcctgtgcgattgcgggcgtcgcggctagcgtggccgccaacgccagcggcgcaatggtcgcaatagcaaaaacggaggataggtgccggaacatcttcatatgttccaacctatcctccgtgaaggctacgtagccggagcccagtcaaacactcagtaaattcttcgtgccggcttagcggcgattgagctgaccgtcaggcctctgactcgtcttcggacttgcggaacgccgggaattcgccggtttccgggtcaacctgtgactcgggctgggtggcgtcatatccctgttcgtagcgggtgcgccgccagttgcgaatcgaggcgttggtgccacggtgatgcacatggtatttgcgcggcgcaccaccaaacggcagctcctcgagctccttggccaccgcgatctgattgacattggacgggtctccggcggcgatcggcgccacgggctcggcctcggtgggcgcggccgtgcgctgctgcatgcgcgaaggcagccattcggcgagcctcgacagcagccagcaggcgatgaagtaaatcaccgcggccatgaccagcgtctgcaggatgttgaagtacatcgagccgagtcggcgcgattcctgcagcaggtcggtatacatgatgatcgagcccagagcggtgtccttcaacaccacgaccagctgggtgacggcggccggcagcatggcgtagacggcctgcggcacctcgacctccatcaacgactgcgtttcggtcaggcccaaagcgagcgaggcctcgcgctggccgcccggcagattgccgacgccggagcgcaccagttcggcgaccaccgaaccgttgtacagcaccaaggccagcaccacggcccaataggacgggctgggcaggcccgcgaacgcgaaccatcgccagaagaagatcatgagcagcagcacgggaaccgcacggcagaactcgacgatcacggcggagacgccacgtaccaacgggttcggcagcagtcggcccacgccgaacaccaagccgaacaccacggcacccaccacggccacgatggtggccttgatggtcatccacagtccgggcaggtagaagtcggtccacgcctctcgttcgacggcgggcttccacagctcccagctgagctggttctcgccgtccggcgggttgtgcaggcgcatgaggataaacacgagcaccaccgcgaacagaatgcccgcgatccagttgacgatgcgaatggtgcgccggcccttgggacctggcgcgtcgaacagcacggaattcgaagtatcggccatatccgtcacctccttacggcgagtttgttggacaggtacgtggtgagcatgccgatggggatgatcaggatcacgtagccgagcgcgaagatcaggaagatttggatgatcacgtcgggacggaattcgatcatctcgctcatcagcgaggatgtttcggtggccacggatgcggcggcggccacggtggagttcttgagcagggcgatcagcgtgttgccgagcggtgccacggagcctcggaaggcctgcggcagaatgatctcggtggcggactgcatgaagcccaagcccagcgctcgtgcggcctcggcctggccaatcggcacggtgttgatgcccgaacgcagagattcgcacacgaacgccgccgtgtacaggctcaggccggtgaccgcgagccagaagaagttcgtggtgaaggtgtcggagaagctgagcttcagctgcgcgtaggcacccagcaccatgaacaccatgatgatggtcagcggcaggttcttgaacagttccacatacgcaccggccacggccctgagcgaggaaatcggcgagatgcgcatcaccacaaggatcacgccgaggatcagggagaacagggcggaccatagggtcaattcgatattgaccagaaacgcgccgagcacgtcatactggctgaagagttccaggaatccgctcatcaggcctcctctccttcgtccggggtgggcgggttgtagcgtacgtcgggcgtgtagttggtgcccttggtgttatcgctgatggcgttctcccacgagccgtcctgaatcatgtccacgatggcgttgttgattttggtggccagctgtgtgtcgcccttcttgatgcccacgccgtagtattcctgcgtgaacggtttgccgaccaccttgagcttgccgcgcgaggcggaggccaggccggccaggatgatgtcgtcggtggttaccgcgtccacgatgccggagaacagggcagtggcgcattcggcgtaaccgggctgttccataagctggacttcggaggcgaacttctccttgacggtggcggcggaggtcgaaccggtgacggagcataggcgcttgccgttcaggtcttcggggccgttgatggagttgtcgtccttgcgcacgagcagatcctgtccggccacgaagtacgggccggcgaaggagacggccttcttgcgctcgtcggtgatggagtaggtggcgaggatcatgtccacgtcgccgttctgaatcatggcctcacgctgcttggagggagcttccttccagatgatctggtcttcggaatagccgagtttcttggcgatgtacttggccacgtccacgtcgaagcccacgtaggtgccggacttcttgaagcccaggccgggctggtcgaatttgatgccgatgcggatcttgccggtttcgtccgcgccgcaggcggccagcgacattgtgcaggccacggcggcgagcgcggcgatcacgcggcaaaccttccgtttgaacgtattggtgaatgtcattggattgcgtacccgtctttcagtgggttcgtcagtgggtgaggatcttcgagaggaagtccttggcacggtcggtctgcggatgctcgaagaactcgtcgggcgtgttctcttcgagaatctggccgtccgccatgaagacgatgcggtcggcggccttgcgcgcgaagcccatctcgtgggtcacgcagatcatcgtcatgccttcatgcgcgagttcgaccatcacgtcgagcacttcgttgaccatttccgggtcgagtgcggaggtgggctcgtcgaacagcatgaccttggggcgcatggcgagcgcgcgggcgatggccacacgctgctgctggccgccggagagctgggagggcatcttgctggcttgggagtcgacgcccacgcgggcgagcaggtccatggccagttgctcggcttccttcttgtccatgtgacgcaccttgatgagggccaacgtcacgttttcaagaatggttttgttggcgaacaggttgaacgactggaacaccatgccaacttcggccctgaggttcgcgagctccttgccttcctgtggcaggggcttgccgtcgatgcggatgtcgccggaatcgatggtctcgaggcgattgatggtgcggcacatcgtggacttgcctgagccggacgggcccacgaccaccagcacctcacccttggtgacggtcaggttgatgtccttcaggacgtgcaaagcaccgaagtgcttttcgacgtgggtcagttcgactagcggacggttcgggtcctctttgccgggaaccagcggggtcaatttggccttgcttggtgatgttgtgcttgtcgtgcgcgaacgcactgctgtttcattgttcgtttcagacatgagtgggaggataacacaccgacgtttccaacgtgttcacagtatgtccacacagttgctcagtcgatgtctcatttccgcatcagacatcgtgaaggcggcattgggcatcggcatacattctcgctgagtcgcgcatcgctcggcgtctgctgtgcgctgattgcctgctgcgtggtggctgagacgttgctgcgacggcaaagcgggcacgtgttgtcctatctgctgattccatgtttggccttggtgtcgttggcgttgctgccgtgtatgccgcagtcgggcgcatggctggcggtcactttgtattgtgtggggctgggctcgccgtttcccatgtcgtattcgtataaatgtgctaggcattttgagcgtggctagctgttcgcacacgatgagtgctgttatacggtggacgacactcccgaagcgcggtggataaccgggcgcggcacacgatatgccggtggataaccggttcgcgccgcttaagttatccccatttttcggttttgcccctgtgccaccgtggaatgcgctacgctcggcgcatgaacggatacagcgaagcgccgcacaatggcgaaatcaacaactatctgcgcaaagatcttgacgccaaagccacggccaagaacacggcctgttggaatctgctgggcaaagtgcgcacgaaacgcacgttgtgtttctcgctgtataccgcattggaattatgcggcgtggagttgccgaggcacagcacgttgccacagaaggacttttatgtgacggtgaggagcaaagggacccgctcttcattggacaatgtcgactatcgcatatggaatgcaaagttcaacagtatcgctttctcaaacggcgtaacctgcatgcatcccatggatgcgtggatacagtttgcccaatatctcaacctcactgaattagtggtgctggctgaagcgctcatcagacgttatggatatgccattgaacaattcactcaacgactaacggcctttcaccgcgttattggccgtgcgcgttgtgaggcggcgctgaagctcgtaaaaccatcggattccgttcaggaaactcgtacacgcttggcgcttatgcttttcggcctgcccataccgcaaacacaatacggcattaccgattcagagaacggatacacctataccgttgacatggcttatccacaatacaaagtcgctattgaatatgatggcgatcatcaccgtcgcttccgcaaacaatatgtgcgggaccagcaaaaacgtcgacgtctgcggcaattgggctggaccgtcatcgaggtgttcgccgatgacctgtggaacaccgccaaacaacgtgccttcgcacaagaggttgccaccgcgatgcaaataccgcttcctggccgtcctcaaccttcatgccgggtattaatagacggcagccttaccatcaatgcgcgcaaaggggaatacaggaggcggaaacaagcaaaacacaacaaagcctcacaacattgatcaaatacggagttgcgatcgctcctcatggggcgacaattcccccatgaggcggcaatttgcccatggggcggtttgaagaaattgtgaaaccgcggaattaagccattttgacctaccgccccatggggttttcaccgccccatgggttgtttaccgccccatgaggaagttaccgccccatggaaggataatcggcaaacgccaagggggacaccgcatggtgcgaggtttgccgcatggcggaggtgccatcgggcggagtatttggcaccccttggcaggtatttggcacattgggccccacccgcaaaaagcaaatggcccttggaattattccaagggccatttgcggctaatagcaccggagcattactcctcgaaaattaatctacgcatgcggagaccgccgttcgaagccgaaggcgcactaaggtgcgtcgagcgctgaggaaaggcggtatacgctccgtagattagttttcgtcggcgtccgggtcgtagtcgacgccggtctcggcgcgctgctcgtcggaaatcggggccggagcaccggtcagcgggtcgcggccgccgccggccttcgggaaggcgatgacgtcgcggatggagtcggcaccggccaggatggacacggtgcggtcccaaccgagggccaaacccgcgtgaggcggagcgccgtacttgaatgcctcaagcaggaagccgaacttctcgtcggcctcttccttggtgatgcccagcacatcgagcacacgggcttggatgtcgtcgcggtggatacgtacggaaccgccgcccatctcctcaccgttgcagacaatgtcgtaggaatcggacatggcgtgctcgggatccttgtcgaacttgtcgatccaatccttggagggcatggtgaacgggtggtgcatggaggtccacttggagtggccgacagccacatcgtcatcatccggatcgtcggtgggcttgaacagcgggaagtccacgacccaagtgaaagcgaacttcttcggatccagcaggccttcgcgggaggcgagctccacacgcacggcacccagcagcagctgggcggactcgcgagaaccggcggcgaagaagacggcgtcgccttcctcggcaccgacggcctcgcgcaggccgttgcgctcctcatcggacagattcttggcgacggggcccttgagttcgccgttttcgccgaagaccacgtaggcaaggcccttggctccacgctgacgagcccaatcctgccaagcgtcgaactgacgacgcggcgtggcggcaccgcccttgaagaccacggcacccacgtacggggcctggaacacgcggaacggcgtgttcttgaagtactcggtcagttccaccagcgggttgccgaagcgcaggtccggcttgtcggagccgtacttgtccatcgcatccttccaggtgatgcgcggtagcggcagctggacctcatagccggcggacttccagatggcggcgatgaccttctcagtcatggccatcacatcttcctggtccacgtaggccatctccatatcgagctgagtgaactcgggctgacggtcggcgcggaagtcctcatcacggtagcagcgggcgagctggtagtaacgctcgacaccggagaccatgagcagctgcttgaggagctgcggggactgcggcagggcgtaccaggaaccgggcaccagacgggccggcaccacgaagtcgcgggcgccttccggggtggacttgatgaaggtcggggtctcgacctcggtgaagtccatgtcttccagcgcgtggcgggcggccttagccatgtcggaacgcagcttcagattgtgctgcatggacggacggcgtaggtcgaggtaacggtacttcagacgcacgtcctcgcccggcagcttgttctcggactcattctcgagagcggtggaaacctggaacggcagggcgtcggacttggcgaggatctcaatggtctcggccacaacctcgatcttgccggtggccagatgggtgttctcgttgccatccgggcgcaggcgcacttcgccggtaatctgaatcacgaattcactgcgcagcgggcgggccatatcctcgtcgtaaatgacgacctgcacgaggccggtcgaatcacgaaggtcgatgaaggccacgccaccgtgatcacggcgtcggtcaacccaaccggcgagggtgaccttctggccgaccagggcctcggtcacttcagtggcatgatgtgttctgtaagccgtctggctcattatcttgtttctcctcgatttttcgcgcgaatacgtcagatttcgacggtttgctgggcaaccacagtatccggctcccacgacgtgcaatcggcggcaacctgctcgcccgtgacgatgttcttgacctcgtcgccagcgggctctgcgccttccgcaccttcggcagcggtggccgggaaccacacgtacggaatgccgagtttgtccgcgtacttgatctgcttgccgagcttggccgcggtgggtgccacgtcggtggcgatgccgcgcgcacgcagttggttcgcaatacggttggcggccgggcggtcctcttcattccacacagcgaccagcacggcggccgggctgacacggttggcgtgagcgccggcggtgtgcagcatgtagctgaccagtcggctcaggccgatggacaggcccacgcccgggtacttgcggttgccctgggaggcgagattgtcgtaacggccaccggaacagatggaaccgagtgatgcggcaccgtcgaggaaggtctcgtagacggaaccggtgtagtagtcgagaccgcgggcgatcttcaggtcggcgatgacggaaccggggcggatggcggcggcctcgtcgacgatcatggccagggtatcaagtccctgacgagccagcgtgtatgcctcggaatccttggcgatgccgtgagactcgcacagcgcatcgaacttggcggcaagctcagcaccgtcggaggcggtgagctcggccaattcgaggcaggcgcgtgcctgtgcttcggtggcgccgcaggtctcggtgagcagtcgggccacctcatcggcaccgattttgtcgagcttgtcgatctcgcgcagcacgccttcgacgtccgtcaggccaaggccgcggtagaagccttcagacaacttgcggttattggcgtgcacggtggccttggggaggccatacgcgcgcagctcttccagcgcggagaccatgaccagcggcagttccacttcatagtggtcgggcaggtcgccggcaccgatcacgtcgatatcggcctgcacgaactcgcggaagcggccttcctgcggacgctcgccacgccacaccttctgaatctgccaacgcttgaacgggaacgccaacgcacccgagtgctcgaccacataccggctcagcggcacggtcagatcgaaatgcaggcccaaccgctcttcaatcggagtgtcggattcatgaccgacctcctgcaaacggctcagcaggtagatctccttgctggtctcgccctttttcagcaaagaagcgccggtttctaccgctcgcgtctcaatgccgatgaagccgttgagctcaaaaaccttacgaagcgtatcgataacacgctgctccacaacacgttcggaggggagccactccgggaatcctgatattgatgcacctttagccacgaaatcaatataataggtgagggttgcgtcaaaacttcctggttcgcccgggatgggagacgctcccgcttatgcattctacgctttaaggagctggccatggccgacgaaactgtcaccgaacccgtaaacaccgctgcgcccgaagagcaggcaacgacacccgcacccgaagccagcgcggccacgccggcgccgactccgtcccccgcttccatgccgaaaccgcacgcgccctcccccgccgccttcgccaagaagactccgtcggccaagccgcgcgctgccgccccggccgccgccaccgccacctattccgaggctgatgtcaaggccgccgaggccttcggccgcgtggatgacaacggcaccgtcttcgtcaaggatggcgacgccgagcgcgaggtaggccagttcccggatgtctccaaggaagaggcgttggcactgtacgcccgtcgtttcctggatctcaaggccaagctcgatctgctggccacccgtctggcttccccgaacatcaaggcccgtgaaatcgacgagtccgtgaagctgctgggcgaagaaaccgccgaaccggcggtggtgggcgacctcgcggccctcaaggcccgttacgtggaactgaaggccgccggcgaggccaagaaggccgagatcgccgaagcgcgcaaggccgctcaggccaaggccgtcgccgagcgcaccaccatcgtcgagaaggccgaagcactggccgcttctctgggcgacaacaccaactggcgctccaccgccgacaagttccgcaacctgttcgacgagtggcagaaccaccagcgcaccaccgtgcgcatcgacaagccggaggccgaggcgctgtggaagcgcttctccgccgcccgcaccaccttcaaccaggctcgccgcaagtgggctcaggctcgcgacaacgagcgtacagccgccaaggaagccaaggaagcgattatcgccgaggccaatgagctcaaggattccaccgcttggggtgagacttcccgcaagttcaacgatctgatggaccgttggaagaaggccggccgcgctggccgtaacgaggacgacgagctgtgggccaagttccgcgaagccgccgacaccttcttcaacgctcgtcaggctgatcgcgatcagatcaactcctccgagaaggagaatctggctgccaaggaggctctgctggtcaaggccgaggctctggtgccggtgaagaccgacgccgaggccaagaaggcccgccaggagctggccaagattcaggaagagtgggatcagatcggttacgtaccgcgtgacgatatgcgccgcatcgagaaccgtctcgacgccgttgacaagcagatcaaggccatcgaggatgccgcttggaagcagaccgacccggaggccgacgcccgcaagtccagcttcgaggagcagctcaacgcccagctcgccgagctcgacgccaagatcgcggccgaatccgacccgaagaagaaggccaagctcgaagccgagaaggccaccaaggagcagtggctgaacgccatcaagtaagggtctcgtgccaggttcccctctgagggaagccggcagcaaggctgactgaggggagtttacggttataccgcaagctcccctcagtcgcctacggcgacagctcccctcagcgaggggagcttcgtcatatttatgccgttttcttctgccctatactcataactccaccccatagttcctcagtcacccagcaattggtgtcttacgcctgagtccctaccggtgctgcaacaattgccgtgagcccttgatgtgcggccagatattcatgcaacggctggctgtatggcatattcagctcgccgtaattggttccggcacggaaggcgggataactgtcgccgccctgaagcagatatgaattggatgcgataatcaccaggtcatcgtccgcaatcggtcgaccgtcaacggcgaggttcacgatacgaaccgccgcatgttcgtcggcagcacactcgtcagcgtcagcgttggtatcagcggcggcatcggcattgccgctcccaccggtcgtaccgcattcggcataccgatacgtcacgttcgaggagatgccgagccagcgccgctccagtcgcccatcgtcacggtggaattgctcggcgagcactctcttcacatcgcgcccggtgagcgtctcatgcgcggccttgaactgcaaggccatgagactatccacctcgcgcacggtgactttgccatcgccattcatatcaagccgtggagtccgcagactgccattattcgaaaatccgattaccggcaaacgatttccggcatacacatgcttcatgattgactcgcggttcgcgtccgccaccagcacaccgaccgtattcccgtgcttatccgaaccttgtttgtcgaaattcacgccggaggccaaggtgccaatcaccgcgttgccggcatgattcgaatatgttgccgctgcctggtaaatatgctgagcgcgcgatacctcatcgttcgcctcagcaccggcagacatccaagcggcttgcgccggatgcgcattaagcccttccacgcccagcacgccgtcaaccgccgtatggctggtgccattgccgaggtccacatcggccactcgcaccgtggcgcgacgcccggcaccggtgatgatcaaatcctgcacggccatattctgcccgaagctgcccgcctcgtaaataggcgcgccaccagcggtcgtaccacgcttgatcgcgtgactgtggccggtgtataccacatcaacatctcgcccaatatcggcggcggctgaagcatcggcgtgcagcaaggccaccaccgcatccacctttccggagcgtttgagttcacgggccacgcgattgatcgcgtccaccgcccgttcgtcaagatcggcatcacgcgtaatctgcggagtggctaccgagccgagcgcatcagtaagggcgcccacgaaaccgatccgcttgccgttcaccgttcgaatcgtagagtcacgtacatggctcagcagtccgtcaggcgacttactggcggcagacgtgttggcgcacagccagtcgatgccattgctgggatcagcgatgcgattgttgaaatcggcgacaccgcggtcgaactcatggttgcctaccgccgaaatcgtcaatccccacgctttggccatgtccagcgtgggttggtccttctccaccgccgactcatacggggaacctcccaccaaatcgccggtcgataccgggatcatattgccgggattatggctgtcggccacggtgaaggcggtggcgttgtccgcaccacgttcgatatgcccgtgaaaatcagtgatgtcggcgatggtcaccgtacgggtgccggaagatggattatcgccggaaaaaggaacggctcccgtggttcccgcacaagcataaggaaccaccagagccgtaaggataagcgctactgcaccaaaagcgatccccgatcgcttgccggcccaccgccggttcttcatattcctgctcacaccagtcacgctaggatcgtcgattgaacggccatgcctaggaaggcgactctcaggtgaattcttagcggcgtcttgggatgggaaaggcctgaccccgtactatcagggtcaggcctttgcaacccgtgtcactacgaatgcgtcggcaaggggagattactcggcaaattcctcgacgcagatctcagctaccgcatccacgcacgcctcggcaatcaggcggccgcgttcggcgcttgagccggccggattggcgagtccgccgtgagcgggaacgtcaccttggcgcaccgggtagcgtacataggatttcgccgtggcaccggcttcctcgaccatacggtccatgtgcaccagttccggcgcgtagtggagcatcaacgaagtttcggtgacggccgcatgctccaatgcccagccggggaacaccaatccatcgaacaccttgtcgataaccgactgcggaaccgggtcccaccaattggtttccacgatggtggccactcccccggtttcgcgggtgaccaggtcgatggcctcgacgatgaacgcctcgttttcaaaatgcgcgttcatgacgacgatcttggtgaagccatcggcgatgagttcgctcagcacgtcgtgcatttgggtgatcactgtcacgccgttcatgtcgatagtacccgggaacagcggcccgccaccggagagcggcttggacttgtatccgtagctcagggtgggcagcacggtgccgtcgatgcgttccgccagatcttcggcgacccgcgtggcgagtaccgcgtcggtaccgatgggcagatgctggccgtgctgttcggtcgaaccgatcggcacgatgacgggatgagtcttcacctccttgaattccggccaggtcatgtggtccatacggcggttgctacccattgcagtactcctttgggttggtggtggattggatggtcaatgaatgcgcccggctccctcgggaaaggagccggagctgaggagatcagatgtgattcagatccttgtcggtgttttcatgggaaagaatcatcgcgaccaaggcgatggccgcaacacccaccatgtaccaggccggggcgatggatgaaccggttagggcaatcaggccagtggcgatgaacgaggccgtaccaccgaagatggcattggccagattgaagctgaacgcgaatccggtgaagcgcacggaggtggggaacgtctcggtcaggtagctggacagggtaccgtcgttggcggtcagggtggcgcacattgccagctcaaccagcagcacgggccagaactgggaggtgttgaggatgaggaaggcaggaacggtgaggacgatgaacgccacgcaagcaccgatgagcaccttcttgcggccgaatttgtcggagatgtggcccatgccgaacaccatgaacacgtaggcgaccaagcagatggtggtgatggtgccggactgggtggcgtccatgccgacggtgtcagacagataggtcggcaggtaggtgagcacggtgtagaagccgaccgcattcagcacgcaggctccgaagctgatgatcagggccttgagatggttgtggaagagttcggcgagcggggcgaacatgccgctcttggaaacgacttggccgtcagcggaggcggcgctcttggactcaagagcatcgttcattgactggtacacgggggaatcggagagcttggtacggatgtacagcacaatcaggccgagcgggccggccagcaggaacggcacacgccatccccaaccgaccatcgcgctggagttcatgttggcggtcatcagcgtggccagcgtggagccagcgagcagaccgatggcggtggacgccggaatcagcgagcagtagatgccacgctgtgaggtgggtgcatattcgccgaggaatgtggccgcaccggcatattcaccggaagcggagaagccttgcaccatgcgcagcagcagaagcagaatcggcgcgccaacgccgatcaccgagtaagacggcaggcagccaatcaggaagctcgcaccggacatgaacataatcgagtgggccaatgcggctttacggcctttcttatctccgtagctaccccagaacagtgcgccgattggacgcaggatgaaggatagcgcgaacacgccgaaggtctgcagcatggcgacggtgtgattgtcggttgggaagaacaccagggcgatggtggtggcgaagtacgaataggaggcgtagtcgaaccactcgatgaagttgccaaggaaggaagataccgcgactttcctgaccatggcctgttcttcagtttgaggggtgaaattcatcagtcgtgcagatgtagtaatcgttgcggaactcatgatgtcaccgtcctttcaaggatgtgctgttcgtgtgactgaatgggattcaagtgggaattcgtttcgcagcaggtcgaccagcgccgcgatagcctcgactatgcccttgagtatttgctgaaacgtgaatcgtcgattaacccgttcggcgtagaagtggacaggttgcccagtggtgctggcgcattattcaccatgcttttcttgccatgatttcgtgagtttggcggcgaatagcagcatcgaccagttcggtttgtcgttatagtcgacgccgaccatttgtgtcactttgtccagtcggttgtacagggtttgccgtctgatacccaattgctcgcacgcgccggttttgctatcgaggttgtcgaagcagacgcacagtgtgtccagcaacaacggagaggcggcgacctcgaatccgatggtctgcaccacgagcatgcgcatcgccttgtccatatcagaggatgcgacgaaacggtcgacgagtgcggacatggtacttacgattcgcccgtatgccggttcctgattggcgatgtcacgcaataccgcgaacccgtcgaccagcgtcaccgtgtccaatgccactcggccatgcaccacgtacacaccgtcgccttccagtacggcaagcgcatccatgcaatggcgtccgaatgcggccgcaccgtctgaggaatcggtggtggagcaccatccgaccatcaagtcaccttccagcatgcaggagacggcgcatcccgaccgttcttcgaaccgttcgaccatcatcgatacatggttgatgccttccaccaccgatctgaaccgaaaagcgaatggcatatagatgcatgatccggcaaaacccagcgcgtcgagcatcgcatgcgcttcctgcgcctcaaatgtattgacgtgcacgccgtcggccgggcccatactcagatgatgcatcatgcccatgcgcgcgccgccgtcaatatagagggcggccaccggagacacgatggtggcgatggcccgacgcatcgtggcgtcgaaagtcatggcgcgttgcgtgatctccaatgctcccaccggccgggagcgactttcaagggcgatgacggcgctcgattcgttgccggcatcgaacgcacgacccgctcgagcggccaacagaccgtcaccatcgaaaatggcgacgctttcgccgaacagcgacgcaatggtttcggccacagcctcgatattgccggtacgggacaatccctcacgtaatgaagtggacattgtgtccacctccaattgcaagtgcatctgttcgtgcacgatagcggtattgacactctgacagatgtcgacaaaaggtacgcgagatttcagaccaatcaacgtcaacccatgcagcctggccgcagacaccagttcgtccggcatccgcaccacaccctccaccagttcgaccaccagagcggcgacaccagcctgtgccaggcttgctacatattgtcctaacgtgccgtgccaatcggcggcgagcagagcgttaccctcgataatcagcatctcaccgcccgaaaggaaactggagacatcctctcgctcgttggtaaacacccatcgcactggcgtatcgaggtctttgccttcgacctccaccacaggatcggctcgtttgaactgcgtgttatgaagcgcactgcgaatcgatacagtcatacaatctgtccattcccccgcggaacaccggtcgttccggttaacctcaccgcaaagcgtgctgttgacaataacctcagttggttacgcgggcagtcggttcacgtaaccgttcggcaacacaccagttgaaggagcgacgatgactaccacactgttcaccaacgcacatatcgccaccggagaacccggcagcacggctgcaagcaccctgccattgcaggacattctcgtcacggatgg

SEQ ID NO: 3028 - DNA, 34063 bp, Unknown
  R19_24m  MAG No. k141_18082
ccaagaccggcatcagccactgggacatcaccgtacgtggcggtaccctgcgcgtggacgtcaccgacagcgacgtgaaactgaccggagcagccacgctggtcgccgatatcgatttgttgtaaaggaatcaggcagcgaacagggccgcgccttcggtgacgatgatgagtaccacgatcgccacgatccacagtatgtcgaccatgaggtcgatgttgaggcggtaatacttattgagtccggccggcaccgccgcgacatcggcctcgctgtcgccatcatcagccgccacagccttacgtgacggcaatccctgcactgccacggtcgcatggctcaacgccatgaactggatggtggtgaagaacatcagggtcaggcaccacgggcacagcgcgtgaatcacgaacagcgactgtgtgctcagccagtacgagtaggccaaagcggccagtccgcccagccacgtgcaggtcgcgaaccaacgcggcaccttcacacgcgccaaaccgatcaccgcgatggtaatgaacaccgattcggcggcgatgccgaagaacgcgttcggatagctcagcccgccgaacttcacgatttccgcctgccaggactgggccaccgccgaacaggacaccaccgagttcagatcgcagccgagcgcggactccggatgcctagccaactgcaaagtctcggcggacagaatgagcgaggcccccaatgccactgccgaggcgatcagcatgatgagatatgtccaagtggcactgtggcgccatccaatcaacggtcgcgcctccgccaagccaagcggcgtggtgttcgtggtactggatgatgtgtcggttgcggtgttacgagtcatcatgtccctttcgatagcgctgcgctccagattagcctttgcggttgtcagctgagtgccgaatgtctggtcttggccgttggcagaaggtgacgacctgtctgcgccttgcgtgggaatgctgagatgaggttacgatggaaggtatgactggatatgtgatgcctttggagccgcccgccgtcgggtgggacattcattgccataccgtcttctcggatggcacggaaacgccggccacattggccgaacaatccaaggcattgggactcaagggcgtggccatttccgatcatgacaccaccgccggctggccggaggccgaagccgcatcccatagggtcggtttgccgttgctccgcggcaccgaaatcaccgccacggatgagaacgtctccgtacacatgctcggctaccagtatgatcccacgaatcagcacatcacggacttgttcgccgatactcgagccgcacggttgcaacgcacgcagcgcatggtcgaattgttgtctcgtgattatccgattacctggcaatccgtgctcgcccaagtcaaggagggtgacaaaaccaccattgggcggcctcacatcgctgatgctttggtgagtgccggcgtatatcggactcgttcggaagcgtttgcgaatgcggtcagcgcctcatccaaatactatattcccacgccctcgccgacctctcatgaagtggtggccgccgtcaaaggggcaggcggtgtgattctgatcgcccatgccggtgatgtgagccgtaaccgcagactgctgtccgatgaccagatcgaagcgttgatcagcgagggattggacgggctggaggtatggcaccgaggcaattcaccggagcaacgagaacggctgctcaccatctgccgccggcaccagctgctggtcaccggcggatctgactggcatggcaaaggcaaaccgaacaaactgggggagaacctcaccgacgaggccactgtcgaagagatcgttcatcgcggcgtgctcccgttatatcggtgattcgcggcaatacaaagcggccttgagatgatgcccaaggccgcttatgcgcgattcacggtcacagcgtgccgaaaccgacggcgtgcttggtttcggagccgatgatcgcgtaaccgagtgccttggcgggcacgatgatgcgacggcccttgtcatcggtcatatcgatcgtcgcgttgtcggccacggcctgcgcgatggcctggctcacattatcggctgattcgtcggtgctgaagttcaccggtcgtgccacgttctgaatgcccagttcgatatccatataaggctccttgttctgccgtctttgtgacgaacatcatggtaagtggccgtcaccggccgaggttctgtactctattgtgccgcgtgtctgcgtcgtcatgtgcggtgttacgcgctcggcgtggcgcggaacaccgcacacgacattatttggatgatgtggatgattcggccagcggattgccctcgctgtcatacccgtccaacccggcacgggcatcgcgcagagcgcgttcttcccgctccaacagcggaatcaccgtggtttgggcactcgaggctccgtgctgaacgaaactgtccggagtatcgtcattcaccgcatcgtcggtcggggcggcggattgagatgcaggggaagcgtcggttgacgtcgtgccgctatgcccgttcatactgaggagctccttcagcgtgatcgtcaccgaagaatgggaagcgccatgtgagggctgcggtttggtcgatcccgtaccggttgcggtgccggagacactcgcttgcgggtgattggcggtccggtcagcatcgggttcgacttccggggtaagatccacgtcgccagcggccacgatgtcagcggaaccggtgcgatctggatcgggcgtgtcgtccgagacctcggccgccgcggtaccggtttcggactgctgcggttgtgcgggtacctgcgtggcgggtgcctgatgacggtcgtcctgcaacaatgtgccgacggtgattgtggagggggaaccgggctccgtcgacgaggcggcggccgaccctgcggctggggccgatgccggagtgtgcttgatcacgcccaactggtgtgcgagtcgttcgacctgtgccttgaactgcatgatgcgattgttgtccgcacggttcaacgcctgaatgaattcgcccacctgttccatctgcagccacaggttggccctgagcatgatgagatcgtcaagtcgagagcccatcatgcggccgtatgcggagagcacggcgttgcgatgggattcgtcgagcttgccgaaaatccaggcaaggtctcgtgccggatcgttgacctgcatatcctgccagttggtcaccgtggtgatggtggaaccggagaacaggaagtcgccgtcggagaatccgccgtgaaccgtgcaggtggagaacgaccacaatccctcggtgtccatgatgcgcgcccagctgtcggtgatttcttggggaacatggccggcggagcgtaagcggcgaatccaggcggtcagctgcgaacgaatctgaccggtggtgactaccggatatttggcattggccagaaaagtcgaaggcagacgatgaatggctccgatggaggtgccgacggccgcgcagtcatccaatgtcaacaggtcgagaggacgtgcctgaccatcacggtggacggcgatcatcacggtcgtctcgcctgtgggaccgggcttgcgcggggtcagcggtgtggactccgcctgggcctgctgccccacggcctgtgcggtggtcgtctggccgggttgggaaacgtctcccgggacgaatgcgaccacacggtccatatcgaagccgaggccaccaagctcgcgcgcggctgccagtgtctgcgccgctttcacacggcggatcagacgtgtacgcccttccttgctgtcagtggcgtatacgtcgtacaacttgcccgaggcatcttggatcacggtctgatcgatgcctttggcctcgtcggttgcgctggcctgcacgttctcgcgtacaccggccacccccagattcggcaggacggctgaggcgagtgccgccaacatataatcgctacgtttcatcacccttccacactaatacatccgtggcgattcgcaccgcagaatgacacgcaaaacgcatgattctggcgatgttttgtcgtgagcccgattcagccataggcgtgagtcgtgccgtgagcgcgaatcgtgccacaatggacgcatggaacaggcgcaggggattcttgaggggctcgatgagcggcagcgtaccgccgcgactacgttgcaagggccggtgcgcatcatcgccggcgcaggtgccggtaaaacacgcacggtcacgcggcggatcgcctatgcctgcgccaccggggcatggaagccggagcgggtgcttgccgtcaccttttcggtaaaagcggcggcggaaatgcgcgcacggttgggccagctcggcgtaggggaaggtgccggacgttccggttcgggtgcgggaactgccggagtcacggccgcgaccttccactcagcggcattgcatcagctcaacagcgtctgggcggacatatgcgaggctccattcccgcatgtgatcgaagatcagcgtgacgtcgtctcccgcgcgatcatccgcgccaccgcacgtaccgatgccgatccgctgaccgttcgcgatgtgctcgccgaaatcaattgggccaaaatctcgttggtggcggtggaagattatgcccgggcctgtgccatcgcccatcggcagccgcccgccggacttgacaccgctcggttcgccgacgtctacagcgcctacgagcaggaaaagacctcgcgtggcgaaatcgattttgacgatattctgctgctcgtatgccatatcatggatgattttcccgaagccgccgcccaaattcgttccaccatcggctggctcaccgtcgacgagtatcaagacgtctcgcccctgcaacacaggctgctgaccctgtggctgggcgggggagggcctgacggcaagagcgcgatgaaccgcaacgtatgcgtcgtgggcgatccggcccagaccatctactcgtttgccggtgcttccagctgggatctgctgcgtttcgccgatgaattcgggccgctcgccgccgatgtcaatctcaacaccgactatcgttcgacgccggaagtcgtgaatctcgccaaccgggtgcttgcggccgcgccgaaccgtgaggattacctgaaactggtttccgcccgcgaatccggcccgcgcgttacccgaaccgcttatgagagcgatatggaagaggcgcagggcgtggcggcacgcatcgcccggttggtcgccaacggagccaagccgtccgattgcgcgattctcacccgcatcaacgcccaacagccggtattcggtgccgctttgcgcgctgcaagactgaaataccgcgtccgtaaggattcgggatggcaatcatccgcgctcgccgacgatgccgcgtccaaacgtgcgctattggaggcgatgggtttggacgccaccggacttgccgcaaacgacgatcccggcgttacgatttccacgattcacgcatccaagggtctggaattcaagcacgtgtttctgatcggctgttcggaaggactcttgccgtacggttcgccggaaacgggggatgcgctggaagaggaacgccggcttatgtatgtgggcatcacccgagctgaggattcgctgcatttgtcgtatgcgcggaccaaggatggttatggagcgcaacacagacgcccatcacgatttttgtgacgggcgtcggtaatgaatgtgaatgttcctgaacgttcaggaacgggaattggctgaaggacggttgactatgcctgcgtatcctccgagttgccgttgccgccatcttctccgtcttcgccgagaagcttggacagttcggcatcccaatcgatatcgccggtcttgccatctgcggcagggtgggaggcggaaccgttggcatcggaagaggagcctgaaggggcgtcggatgacggagacgcgccatctgcgggcttgtcgctaggcagcgaaggcagcagatcgggatgcgaccacttggcgtcacggccttcagggccttcggcggcggtgatcatctcccacaatccggcggcctcgcgcatgcgcttggggcgcagctgcaaaccgagcagactttcgaacgtacgctcggcggggccacccatcgcgcgctcgcggcgcatcatctcacgcaactgttcgatatgaggcagatgggccataccggcgcgccacaccacgcaatccacccagccctcgaccatcgccagcagcgattccagcgaagccagcgcctcgcgctgttcgggagtgtcggggatgccgaccttggtgagattcaccgcgccggaaatcgactccggatccatcgacgtggcgtcacgcagctgttcctccatcgcatccagatcgatggagatgccgcgtgcgtacttgccgatgagcgcctcgaaacgcggcatcagccacggtaccgaggcatacaggcgggcgtgagccatttcctgcagggccaggaaggaaagcacttcagattcgggaattttctcggtggtctcgaatccggagagcgcagcctcgaacgcggcggcgtcggcggaagcatcggagccggagacttgggcggtaccgtcagttgccggagtatcgctgttgccggccgaagtgaagccaatgggattggcggaagcgtcggtggatgtggagaacggattgaccgagtcggttgaagtgccggccgtatcggcctcgggcgcaggagtctcaccgttcagcatcttcgcgtattcggtggcgttctgggcaatcagtccaccagccggattcttcagcaatgcgatgccctgatcgaaactgccatgcacttcatggctcagattgccggccgcatgccccaactgcatggcaaaggacgtgttgcccagcagcttcatcagctgggctggatctttcatgccgtcgggaatcggaatcggcaccggtccggcgaacatgccggcaatctcgccatcgccgaacgcgccgccaagacgctccgaaatcaccgaagccaaagcgtcgttcatcgactcggccacaggagctgcgaacttcgcccactggtcgatggtgccttccacccagccggcgcgggtcagcacatccggatcgccgggcgcgggattgaactcgcaggcggtatccagccacaggttcgcctcactcatcgcgcggcgagccgcctcgccatccacggcggacacgctggacgcggaaccggaggcgttggcctgctgcaaggcaatcgacttggcgagcttgacgttgatcggcccttcctcgacagtgcgctgcatatcgcccatcgtgttgagtccgccggcgctgaacgcggccatcatctgctggacttcggatggattgggcagtcggctggggtcctgactcatcagctgttcacggatctcctcaggcaactggctgatctgctgccaggccatctcgccctgaatggggccgaagcatttgatcagccactcgtgaatcgcgttgtcgtccatgcgtatccttctttgccgcggtgtgttaccccaagtgtagggtctgcccgggcctgttcgctcgtggccgagcaatattttcggtttatgttcgttttcggctgatttcggccctccgcttacactgtagggtatgtttgcacgccacaggaatcaggaaccaggcttcgtccaggagcagaagagcccgactgcggattcggaagcgggggatgggcgcatgccatcgttcgaagtgaagcatgattcgcgcctatctcgtggaatcagccgtgctcgggcctatgcggccgctcgtccgaaacgccatttcgtcggtgcattcgccgtgttgcttggtgtggtgattctgctgctgcccagcccgtacgtcatcgagatgcccggacccacccaagacgtgctgggcaaggtcgaggatggtgcggttatcgacatcaccggtaccggcgtgacgacgtataaggattccggcaagctgctgctgaccacggtgaacgcgtccggcgtgcccgggtacccgatcatcaacgcgcaggccgtctggggttgggccaatccgcaggtggaggtcatgccgcgtgaggccacggtaccggtgggccagagtgcggaccagtatcagaagaaagtcgaacaggacatggccggttcccaggattcggccagtgccgtcggtctggcgcatgccaaagcccatgcggacgaactgggcattgacgccagtacattgcaacacgtcaaggtgacgatgcacgtggacagcatcggcggaccgtccgcaggcatgatgtacacgctcggtctcatcgacaaactcacccccgccaacgagagcggcggcaagaccatcgccggcaccggcaccatagacaaggacggcaaagtcggcagaatcggcggcatagagctgaagatgcttggcgccaagcgcgatggcgccacatggttcctggctcccgcatcgaattgttcggatttggccggccgcgtgccggatggtctgcgcgacgtcaaggtcgccacgctggacgaggcgtatcaggcgttggtggccatcggcaaggggcaggccgacgatttgcctcattgcgaggcatgacacgcgcggccagtcgttgtttctggtgagacgactcgcatgggtctgcccacaatgcggcgattttcggccgcgttaacgcatttgttcgcgaagacttgctaatgtgtcccctgtgaatcaaacggcatcacagaacgctgaagaatttggtttcgagcccggcgatatcgttcaggagtggctctgggacgacgatgtggacgattccattcgtgcccagattgaagagctcacgggcgaggatctcgtggacgaggactacgactccgctgtggacggcgtcatcgtatggtggcgcgacggcgatgatgaggacgaattgtccgatacgatcgttgacgcctacgcggtactgggcaatgacggcccgctgtggatactgactcccaagcccggccgcccgggtgccaccagctcatccaccgtgcagtccgccgcacagaccgccggtatgaacgccgccaccccgctgaccgtcagctcggactggaacggcatccgcctgcgcgcattcggcaagggtcgctgataagcctcaatcaatacgcttgactttaagcgtgttgactggcgttgtgtgctgcgtagtgctgctgggcgtgactgaatgtcatcgcgattgagcgctacggcacgcgtatgcgacaccacgtgtcgcgcagtgccggccatacgctattgttgtcatttgcgggcaattagctcagttggttagagcgccacctttacacggtggatgtcgggggttcgagtccctcattgcccactttcatttttcatcacttcgtgcaatcccctcattccacagacatgggctgtgacgatattccctgacggtcttcggcaagggttctgaaatctcaatgagatgcgtgcagaaggaaaccggcagtactgctacaaaatcgtgaatttcggtcttcttggtcagatgcgtctcaatagtcacgtaaagttgtggcagagtgtttatatccagcaggaggtcgaatagccgatggcgcaggaacttcgtgaaggggacggcaagtcgggcatcgcacgtgcgggcaagcgcaagtgggggtatgaccccgctcaggtggacgctttcctggagcgcgcccatgctttgtatgacagcgagggcatgaatctcacccagcatgacattcagaacgtgtcctttgatttgcgcaagaacggctatgtgatcgcacaggttgacgccgcgcttggacgtctggaacgtgccgtggtcgataagcagaccacatgggagatcgcacagcatgggcgtgtgacgtggaaggcgaagaccgagaagctgtatcacgaagtccagaaccatgcggagcgtgacgagcgcgaacgcttcaagtccggagcgcccaagcagccttcgtacgataagaagcaggtggatcgtctggtcgaccagattgtggacaaggcggcggccgcattgggcgttgacggcgttaccgaagacgatgtacggtctttggccgatctcaatgcgaatacggtcaacaatgtgatcttcacccagcgcaagggcaagaaaggttatgacgagcgacaggtcgattacttcctgaacgcctgcgtgcagttgctgagtcgcttggaatcctatgcccgtgtggccgatttcgtgtccggcgagcctgcggttcctgcccagaccgccacgaacgtgaccgttcaagcgaacggcgtctcaccgttgttcgcttccggaacgcagcgcccggcaactgacgaacgttttgctccggctgccgttgctcatgacgaatcattcgatgccctgcatcaggccgagcagagcttgttcacggctccggctccggttgctcccgcaacgccggccgcggcggcgccgatctcctatgcgccggctcctgcatcgttcgatgcttccacaagcaccaatagcaccaatgcggaacagccggtttcctttgctcccgcagcatacccggtgcatgcgtccaacgagtctgcggcgaagcccgtctccgagacgccttccgtggctcctaccgcagttgctgcggctgagcctcccgtcagtgccccgtccgcgccggtttccggtgtgaccgctggcagcgtcccctcgtttgctccggcacaggcagctcacgaacccgcagctccgtcatcgaccccgtcggtgttcgcggaacagcccgtggatatggtgcagaacgattcctctttggccgctctcgcccacatggctgcggtttctcaggaacttccggcagtggatgcaccgtccttcgctcctaagatgcccagccttgatgcaccgaatgcgctgaaattgaatgaggtaccgggttcggtttcatccccggcaccctccgccccggcagtacagcctgtgaatagcactgctgacgaggctgcgtccgctgccatgccggtctcctttgctcccaccagcaagccggatcgtaacacgaactctattccggttcgcgtatccgatagtcagcctgcagacagcacggtctcccgtccggctgtggaatcatctgaatacgttgccgcctcccacgacacggaagcagctcagccgtcacaggataagcacgattccaacgattcgttcccgctgctgttcccgcttggcggtaacttcgattcggatatccccgacctgtcgttccccacactgaacaatgacgatacgaagaaggaaaagtgagcatagcctccaactccactgtcatcattctcggatccaccggatccatcggcacccaaggacttgacgtcatctcgcgtcatcctgaacgatttaccgtcaccggtctggcggcgggcggagcacatatcgagctgctggcgcaacaggccgcacagttccatgtgcccgaagtcgcggtgtttgatgagaccaaggttccagcactgcaagcggctctcgcacaggccggcgcacaaggtgtccgcgtgaccggcggtccggattcggtcatcgccatggccggctccggtgcgaatgtcgtattgaacggcatcaccggctcgatcggcctcgaaccatcgatcgcggcgctcaaggccggttcccagctggcattggctaacaaggagtccgtagtcgcgggcggtcatctgctgttcagcgcgcaagtgcgcgagaaccagatcaacccggtcgattccgagcattccgccatctggcaatccctgcgctccggaacccacgccgaagtcgccaagcttgtggtcaccgcctccggcggcccattccgcggctggaaacgtgtcgacatggagaacatcactcccgagcaggcgctgcatcatccgacgtggaacatggggccggttgtcaccatcaactcctccacactgatgaacaagggcctcgaagtcatcgaggcgtcccgcttgttcaatgtgtcgcctgaacgcatcgacgtgaccgtgcacccgcagtccatcgtccattccatggttgaatttgtggacggtgccacgatttgccaggcttcgccgccagacatgcgtctgcctatcgcgctgggcctgtccgcgccggaccgcatgaccaatgtggccgccgcgtgcgactggacgcaagccgcaacttggacctttgagccgttggacgatgaggcgttccccgccgtgcaactggcccgccactgcctggccgcctccgagaagcatacggcggtgctcaatgcagccaatgaacaggccgtgcatgcgtttcttgatcatcggctgccgtacctcggcatcgtgggcacggtcaaagccgtgctggaccagatggacgccgagcttcgtggtaacccgctgttcacggacgtggaggaaatgaaccagcttgagcttgaagcccgccgacgcgccgacaacctgataaacaagcaatgatgaataccttgaatacggaaaatcccatcgaaaagccgttccgcaaaaccggtgatccggtcgacctgaccagcgaatcgcctttgcatccgcgccgcaagtcccgccgcatcatggtgggcccggtgccggtgggcgggggagcgcccatctccgtgcagtcgatgaccaacacgctcacggccaacgtacctgccacgttgcagcagatcgccgaactgaccgccgccggctgcgacatcgtgcgcgtggccgtgccgagtcaggacgatgccgacgcactgccggaaatctgccgcaaatcgccgattccggtcatcgccgatatccacttccagtccaaatacgtgttccaagccatcgacgccggctgcgcggccgtgcgcgtgaaccccggcaacatccgtaagttcgacgaagtcggcccggacatctgcaaggccgccaccgacgcgggcatctcgctgcgtatcggcgtgaacgccggctcgctggacaaggaactctacgccaaatacggtggcccgactccggaagcgctggtggcctccgccttgaaggaagcgcacatgttcgaggacgtcggcttccacgatttcaagatctccgtcaaacaccatgacgtcatcaccatggtcgaaacgtaccgactgctcgcatccaagggcgattggccgttgcacctcggcgttaccgaggccggccccgcctggcaaggcaccatcaaatcctgcctggcgttcggtgcgctcttggccgagggcattggcgacacgattcgcgtgtccctttccgcgccgccggtcgaagaggtcaaggtggggtgcaaactcctggaatacatgggattgcgcccccgcaagttcgacatcatctcctgcccgagctgcggccgcgcccaagtggatgtgatccagctcgcatccgccgtcaccgaaggcctgaaggacgtgaccgcgccgatccgtgtagccgtcatgggctgcatcgtcaacggtccgggcgaggcacgcgaagccgacctcggcgtggcctccggcaatggcaagggccagatcttcatcaagggcaaggtcatcaagaccgtgcccgaagaccagatcgtcgacacgctgctcaccatagcgaacgatatcgccgcccaaatggaggccgacggccaagtgcccgtcaattccaccggcccggtcgtggtcccaatccagcatcccggtcactgattcggccgaataggccctcggcgtaaatatcgcggtcagattacaatagcgcacgtgtcgcaagaagaagagcatcgcctgactgttcgatccaagccgtggaccagcacccaccggctgatggtcagcctgcccatcttcattatcctgatcggcgtgctggtctccatttccaacctgaccacggtgccttggaacatcgaacccaccggccagtcgatggccacgctcaccgacgataccgaagtcaccttcgataacccgtccggagaaacgctgccggcgaaaggcacgtatgaggtcaccgagcgatacatcacgctgaacatgaccagcgacggcaatctgaccaaggagcctggtgatcggggcaaggccaatgcggacggcgtccaagccatcaaggtattgattcgggaacctcagaacgcatcaggcaagcgccccggcgtggtgttcatgcacggtgccggatacggcacctgtgacaactcctttggcgacgtggcctccgatatggcttcggccggctttgtgaccgcagtgctcgacaaacccgtctggagcaccaccgacatcaaccgcgattatccggcctcagccaaggcatatgatcaggtcatcgaatacctacgagcccaaagcgatgtagacgccgccaaggtcggcatctatgccacctccgaatcgacatggatctcctcatatctgctcgaggacgatccggacgtcgccttccagattcttctgagcccgatggtgttcagcccacgccaatcactgggatttttcgtcacccaggacttcactcttgtcggcgcgaacgagggctatcgatccatcgtccaacgcgtgttcagcgcggacaccggcctgttcggactgaacaattccgacctcgccacgctcaaacccgccgcttacgccgtacccacctatgtggcttacggttcaaaagacgtgatgacggcgcaggtcgacggtgtgcgtgcgattctctacaacgcccacaaagccgataactggaacgtgaccgtgcgcagctatccggtcgccaaccatgtgctgcgtttgggggatgagtccgaagcgggcaccccgtttgcggacgcctatgtggacgatctcatcgattgggccgtcggcacttccgccggactcacgcagaccagcgaaaaggtggccggcaccaatctgtaccaatcaatcggtctgccgggcgccttgaaggcaagacgcgtcggcaccatatatggtgtgatcctgcacgtcacggtggtactgctgctgctcgcatccatcgtgctggcactggtggcgctgggccgcaaaatcgcggcggatgcccgatggcggcgcgagaaacgcgaggccaaacgtgcgggcatgctgataccggaacggcctgtgatactcggtttcgcacatggtttcggcaacgcgctgctgactttgaccctcaccactcttgccacactgctcatcttctttgccggacttggacaggtgattatgggtgtggtcaaacttgcatggggcagcgctcctaccgagacgccgggcgtcatgtattggagctggccggtcatccaagtggtgtccgtgctggtgctatgggcttggtcccgcgtctttatgcatctgatagaggtcgcttccgcccgcggactgattcagataccccctcgtcgtgaatccgttcgagacatcgtcaccggtgccgacccggtactcgcctccacccgtctgggccgagtcctgttctggctggtggccttcaccatgctgtacatactgttggtgttcgccttctggggcctgtttatttactgactacttcattgagtagagtctgccgggcgtcgcggggaaaggagatgagatgtcgctgtaccgagacgaaggtgtggtgttgcgcacctccaaactgggcgaagccgatcgtatcatcaccatcctgacgcgtgggcatggcaagattcgggcggtcgccaaaggcgtgcgtcgcaccaaatcacgctttggtgccaggctcgagccgttcatgcgagtcgatgtgcttatcgctgaaggccgctcgcttgacgtggtctcccaggctgaagcggtcgccgcttacggtgctccgatcgcggcggattatgcggcgtatgaggccgccaacgtcatcgtcgagaccatcgataaactcgccagcaccgaacacgagcagctgacgaaccaatatcggctgctcatcggcgcgttgaacgcgctcgccaaacaatcccacgccccgcaagccataggcgactcctatgtgatgcgcgccttggccttggccggttggacgccacgattgggtacttgcgtggtatgcggcaaggcggagccggcgtacctgtccatcgcgtccggcggcgtgatgtgcgaagccgaccacactaccgatgcgcgccgtatcgcgccgttcgtgttaaaccagttcgatgcactgattcgtggcgattggtcggtgcttgatgccgcgcctgtggagcgggttgtgcaggagttggttgaagattggggggagtattacctcgaacgcccgattcgttcgctgcgcttgatagattcatgagtatggcttttgagaacgttgattacacgtcgttggacattcccgcagctccgttcagcgaccctgcccgtattcccgacttccccaagaacaaggtaccccgccatatcggtgtgattatggacggtaatggtcgttgggccaagcagcgcggcatggtccgcaccaatggtcatcaggccgccgaaccggtggtgttcgacactatcgccggtgccatcgaagccggtgtgcggtatttgagcctgtacacgttctccactgaaaactggaagcgttcgccccaggaagtgcgcttcctcatgggcttctcgcgtgaaatcatccaccgccgcgtggaacagatggacgagtggggtgtgcgcgtgcgttggtccggccgtcgccccaagctgtggaagtcggtgatcgacgagcttgaggccgccgaggagcgtaccaagaacaacaaggtcatcgatgtggtgttctgcatcaactatggtggccgtgctgaaatcgccgacgcctgcgccgccatcgctcgcgaagtgcgtgatggcaagatttccggcgaccgtgtgactgaaaagatgattgccgaccatctgtacaatccggacgttcccgattgcgacttggtgatccgtacttccggcgaacagcgcacctccaacttcctgccgtgggaggccgcctacgccgagctcgacttcgtgcccgaactcttcccggactgcggccgtgacgtgctatggcgctccatcgaccattacatccaccgcgatcgccgatttggcggcgtgaaataaagaacagtcctgtggactgtgtttgcggggtttccgatttggttcgggagccccgtttttgttgcgttttacgggttttgcttggtttgtgatggtttggtgtttgtgtctcggtggctctgtttgtgtcggtttgcgcgccttggggtatcatctggggtatcgccggccgatgcgggaaggctggccccatgcgcaggagaagaggtttgagcagacggttcggttcggtggtgaagaggaagaaccacaatggcgtgcccacgtgtctgttggcgcggtatcccaatccgaaggagccgggcaagagggtggtcaggaggttccctcttggcgcggaggcgttggcgtatgcctggctggatggcgaggaggggttcgtcagggattacgagcgcgggctatccgactgggtgccgccggaggagcgcgagcgtgtcgtgaagctcgcacgcgaggatttcgccgtgtacgcggaggatttccttgactcgtatcgcacggttgacggcgggcgtctccgggattccacgatgcggctcaagcgttcggatatggccttgctggtcaaggcgttcggcggcatgccggtgagtgagatcggccggtcggacgtgggcgcgtggcttgacgatggtgtgtccagtccttatacgcggcgtcgttgctatcagttgcttcgcgccatgatgtcgcgtttggtggaggatggcgtgatcgcgtcgagtccttgcgtctttcccgttccccgtcttccggagagtcgccaggccatgattcccgccgccactcgcggggaattggctttgatctatgacgcgatgcccgacgatacggcggtggcggtgtatctgggcgcggtgtgcggcctgaggatcggcgaggtgtgcggtctgagggtcggtgatgtggatctggcccgtcgtgtgctgcatgtgcgtcacgcggtcatgcgcagtctgtcgggcgagtgggtgctcaaggaacccaagaccgcggccagcgccggggacatgccgatccccgagggtctggccgccatgttggaggcgcatatcaaggcccattgcgacgggggcggggacgcgatgctgttgtccggcgcgcgcacgggcggcatccttcccccgtccacgttgcgcggccagttcgaccgggcccgcagggcggcgggacgtcccgacctgcatttccatacgttgagggccaccgcgatcaccgccgccgcgcagtcgggcgcgagcccgaaggaggcccagcggtacggcaggcacgccgacgcccgcatcagcctggagttgtaccagcgtgccaccgaggacggtggcaggagggtcgccgaggcggtgttcgactccctcgtgcagaccggtcgcgaccgcgcgcgtgtggaggccgagctcgcccgggccggggaacgtctctaagccgcccgccgtgacgtggagcgcctcgagaaggagctttcatcgctgggctaggccgccttcgcgcccggatcgccggaaggggtgtggcctttctgttgttcatactgcgggagtggatcgtcgggactgcccgcccagtctctcagggtggtctcgctgattcctaggaaattgtggagcgacttgacgcttcgtccgtcggtgttgatcagatgccatatggctgatcgcagttctttttgcagcgcttcgcgtatatcgggaatgacgtggggctcgtcttgcgggtcgcgggacgggatggaggaactgcatgtcagggtctttgcgacgtggatcagttgcagctcctggtattcgccgatcgtgagggtgcggactaggtcggcgagctccccctcgtcgttgtacagatccacgtatgcctcgcggtccttcagtttctttttgtggggccgcatccattccacgaacgcgaaatccagtccgagccgtgccatctcctcggtgatgcttggatcggggtcggccgcgtccgaacgcagcaccctgagcatctcctggaggcgcccgatctgggtttcggtcagcatcgccatttcccggatcacgtccgcgcggatcccgttcgcgcggatcctttcccgctcggctatcctttcccgctcggctatcctttcccgctcggttattccgtcgatctgtctgaggaaccgtgcccgttcctcccaggatgccggcccggcgtcctcgatgccgtccatctcgtccgtgtcctcgttgtggtcgtccatgcgctcctccttgtgatgtccttctcccattatccgcttgcccgcgtctcctcttccgatgacgcgcatgggtgtcgaacccgctcgggttccgctctggttacgaccgcgctttcaggcgattatcgaagtgtcaaggaaaacgaaaggagcgatcacgatgggcgcacacgatctcgacaagcggtggctctcggtggccgaggccgtccaatataccggcctgtcgcgctcgacgctcaaccgcgcgttcgtctccgggcgtcttccgcgatacaaggctggtcgccgcgttctgcttcggcgttcggagctcgacgcctttatcggccagccggtcaactctgccctcctcgcccaacgcgagtaccggcggctcaacaataaatccgcaaaggactatcatggataaaattttttaagttcaatacgctcagtcagccgacaaaatatccggtcgatctcggtcggatcggtgtcaacgtatacgacgtggcacccaagtgggtctaccaggacggccggcgcaccgatgtgcaggccacgtcgaaggacggcgtgccgcgctggacgatcaaggcgatcctgaccccccagggccgcgcctccggcgctcccgccgagatcacgtactactcggaggaacggcccgaggtcatgggcgcggcgaccttcgacagcctcgacgtttccgtctggcatatgccagagcgggatatggcgggcatcgcgttgcgcggctcaggcctgcgatctctgggctcctcacgggtcgccgctgatgatggcgcggtggaattgtgatggaatgggccgatcttggtgaggagctggctccgacgcgggccggttcctccgatgagggtttgtcaagcgtcttcgcgcatcagatcgcggttttcgcggcgttcctagtgttcggtttcgtcatttgcctgttgtccttggacatggcaagcggaaatgcgtggaacgcggcgttgatcgacgcgctgttcgtcgccaccggggcgacggctgtggtctgggtgaccgcgtcgtgtcggcccgtgcgcgaatgggtcggctatgtcggtgaaatgcagtccggcgaacaacgtgcgttgcaacgccaggtggacaatgtgtttgagaaatggcgggatggcacggtgcccgcacgggccggtcttatggtcgagcgggcgttgacgcccatcgagtcggcctggatccacgaacggttcgagttgcagcggggtcgcgccaggcaacagatccaggacggcgtgctgcttcgccagcggctcgccatgatcgacgccgccgagcagtccgatcgatgcgagtttcccggtctgcggctgttccatgatcccaagacctgtgttgtgacggccgtcgtgactccgccgccgtcgatggacgtggatcaggtggtggaggccgttccggcgttggcccagttgtggaacatgtccgccgacgagcctgtcgtgcgggatcgtgcggtgctgatacggcttcattcccaggcgaaggaggagtgggcgagatgacgttgaatgatggtttgtcttcgatggcccgcgtgcgcgttggcctgaccgggcatagggagccgatcgactacgacgtggccacgccctcgcacatcgccctggccggtgccacgcggtcgggcaagtccgcgctggcgtactggctgctgggccagttggcggccatgccgtgggtgcggatcgtcgggtcggacatctcccggctgttgttggccccgttcgccggcgatcctctggtggccctgggccaggacgatctcgacgcgcatgcgagggcgttggagggcgttgagaagctcatgcgggatcgtctcgaccgtctgctcgccgagcggtgtgacaagatcgacgagttcaccgtcgcttgtcctctggtgcttgtggtgatcgaggagttccccagcctgctggagctggcgaagaccctggacgcctcgacctcgcccaagggcaggctcgaggcccggttgaggtcagtgttcctgcggctggtcacccagtcggccaagtgcggcgtgcgggtgatggtcgtcgcccagcgcatggacgcctcgatcctgcagggtgtggcccggtcgaacatcgagacccggttcctcctgcgctccgatgaagccgggatcgagatgatgatccccggcctggatgaccaacagcgctcgttcctcgcccgggcccggcccggcgtcggtttcatgacggctccctgcgtgccgcccaccctgttccgtggggtcgccgtgtcctaccagcagtatctggatcagttggaggcgtgcgtggccttgtcgtccgcgtcgcttcccgtggcggatccgtgacatgggccgcgcatgcggcgggcggggccggcgtgccgcgaaggcggcggagccggatcccgcccccggccccgccaggggccggggtgcctggcctagtgttacccaggcacttttgtgtctgtgtcctttcatcccgttcgtccccgattgcaggcccttttgacccggaggggcttgtgtctggcagtgtgtcaaaggttgtgtccaatgagcaacagcaacaatccaaccaagcggagggccaagtcccggtccgcgtccgcggagggcaggaggagccgtggatggctgatcaccatacccgtcctggccaccgagcccgacgaccccgacgacccggccaagggccggcatcccaccggcgggatccggtacgagagggacatcgccgccgcgttcgccgactggccctggtgcggccagatcgaggagggggcgcagcgctccgagggcgcgtcccacggctacctgcactggcagatctggatggagaccgggaaccccaagaaattcagcaccgtgaagaaccggctcgccaaggcgggcatgccggacgcccacatcgaacccagggaaggcaccaaggcccaggcctacgcctacgtcaccaaggaggaaacccgtgtcaaccacaccatcgaaatcaacatcggcgaaaccaacggtcccgacgataacggcaaatgacgccggcccgttcttccacggcctgtccgccaacgacatcgcggacgagcagggcaaacgcaacgacctcgaagagctgcgcggcatggtcgaacagggcatgacccttgacgagatactgctcgcggacaccgacaaccacgcctcccgatgcgtcggatggctctcgcggctcatcgaggcaagggacaggtcgatctacaactccagcagcggccgcgacatcgaggtctactacctgtacgggcagacgggcgtgggcaagacctcctacgtgatgaacagatacgcgcccgaggacgtgtaccgcgtcagcgactacctgcatcccttcgacggctacgggaaccagaaggtgctgctgatggacgagttctccggcgcgctgccgttcgaccagctcctgaacgtcaccgaccggtggcgcaccaccctggccgcccgctaccacaaccggatcgccatgtacgacaccgtgtggatcgtgagcaacctgcccctcaacgaactgtacagcgagatcgaacggccccgacgcaaggcgatgttcagaaggttccgccaggtcatctacatgaccagacaaggcggcatgcaccgctacgaccccaacgagatctccgactacctcggcgaccccgagcacgccccggccggacgcttccatctcctcggactcgacgacagcctgagggccgaggacatcatatgagcgcacgcctccggccgaccttatctggttgagataattattgatgccggcgtcggtcggatcgcccgtatagggcaggttcctgatgatcgcgtccttcgagccggtgaagtaataccccttcgccgtcacgctcgtgccgtcgatccaatggtcacccgacttcacgccgaccgtcaccctgtcggtgatgggctggccctcctgaatgatgtgaggggcctcggtggagatggtgggggtgaaggccatcgggggctgggactcgttcaccgcgacgcagatggccaggttattcaccgtgccggctgcggccatctcagccatgcccttgtcgaactcaccacgggcgaacttggttacgtcgccatcagtccaaccattcaaaaagaaccttacaccaccgttcggctgtgcctgagcctgagaccatctctgctcgaacagggacttccagtgcgcggcgttgtcgccccacatgaatccaccgcgcagcgaggtggcgaagccaatcacgcgcgccctttgatgggtggcgtcgagggcgcggttcaccgcctggttacaggccttctgaatcagaggcttgttgacaccagaatcactgacatccacgcctgctttggccagatcgctgagcagatcgctggtgttggcgttgtcccttgtgccccagccggtgggcggtttgcccgcagcagtttgagccagattatctttgagccacaggacgaagtcattcgggccgatgccggtgttgccgccaccgccgataatgacgccgttgccggagttgtcgatggcgttggcagaggaaacggccaccaaaccacccgtggcgagggtcgcgaacgccgcaagcgacgcgatacccctcctcagccaacccggcttttccttgggcggagtgggcttgctatgctctttgtatttcagcatatctctcctaaatcgaactatattgaccaagcaacgccgcgcacccaccgaacccaaccagcggcgcacgacctgcttgccccaaagtaggcaatcacaccacaagcatcacccacgccagcaagagcatgcgtgaagacatggaaaagccccacctcaatgagatggggcttccaaggagagaaatgactaaggtcagttgccaaggatggagcaagcaaccttggagcaatcaaccagcgggccggtgccgccgccaaggactccattgttgggacgttggatgggggcaggagcgggggctgaggaaccgccggtgtaggactgctgcggggcggaataccctcggttggaggaatacccgctgccggagccgccgtaacggttgtaggactgggagtaggagcgctgcgactgcgcggcggcttgcgcggcttgggcttgggctgcctgcgcctgcgcttgggcttgggctgcggcctcggcgtcggcctgctccttcgcggccttcgaatcggtcacctgcttgacggcggcgtcgagcttcgccttggcgtcggtgtacgtcttcgggtcggtgacgcccttcttggaaagggtgttgttcgcttcgtcgatggccttcgcgaggctgtcgcgggtggcgttgtccgccaccttcccgtccgtgtccttgagggtctggctcgcgccgtcgataccctgcttgagctggctcttggcggtgtccagctccttcgccagcttgctgtccttgacggccttgagcgcggcgttgagcgtcttcgcttgggcgttggcctcgtccgcgtccgtggcattggccttcttcgcggaggcgagctgccacgccagccactcgctgggggcgtcgttggggatgcccttgagcgccttggccttcctgatggcggcgtcgagcttgcccagcagcttcggctccttgagctgatccgccttatattcggtcgccgtggcctcgtccacggccttcgagagcgccttgtcggcgttctcggcttgggctaccgcctcatggtaggcgttgtcctcgtggtgcgtccagtaggcgtagccgccgccgatacccgccagcgccacgaccaccaccgcgacgatgacggcggtgagcttgatggatttagcgtccctctctggcttgaattcgctaacaggattttgcattactttctccgtctctttgattgggtttacgcggctcattgcaaaccctcaagattcatagatcaaagggcttagatgcatgatgtcatcgtcggtggtgaaaaaatgaaggctcagctacctatacggcaccaaacggggcatgccgttgatgacaatacgcggtttgtcgatgaatttgttggttacccaagtgcctcgatcatccagtgtctcgaattcggggctgtagacattcggcgggtaataaacgtatctctttccctcgtcatccatccaagtctttgatccattgctcagggtctggaaagtgcccttggccattggatgcgattcgatgccgcctccgggcaacaggtcgattagcgtgcagtccccgttcaaggtgctgcctccgccggcatttcctgctggtccccaactcccggcgaaagccgagcatggtgttgagttggcttgggcgctttcgcttaccgcgttcatggcgtcatccagttgcttggatgcgtcggcgatgccgtttgcgtccttgccgtccttggccttgttcgcgttgccaatggcggtctgcaatgcggatcttttatcggagtcggcgtccgaaccattgctattgagcaggtcctgcgcctgcttgaccttatcgtccaacgccgtggaagcatcgacgagcgttttcgcttccctggcatctgatatggctttggccgccttctgcaaagtgcgtgttttcttcgtcagcgtcttggccccgcgatccgcctggctggcgttacggtcaagctcattcgttggcattgacgttcggcaccctgggatattgatgtcctgggggatatccttctcggcttcggcataggcgtcgattagcttctggtcgcccacgtcgtcaatggtgagtttcgacgtatcggcgttgtcggagaccgtcttcctgatgctggcggcggcatccgcatatcggcctaccgacgattcgcatgcggcgaaggccttgccgtgcatggagcgcataatccaccagccgcccactccgcctccaagcgccagcacgacggcgaccgccacggcaacgataatccatatacgcttcttacgcttgggcacgacgggcgattccggcctgccattatcgcccaccggcggagacacaagcgtctcactgttgatgtcgccgcccatatcagcggccttcgccccgcagttcatgcagaatacggcgccttgcggcagttgcgcaccgcaatagctgcacaccatcatcgatgctcctcttcttcgatattctccggcgtcattatttatcggcagcttccatcggaacattggggtccgtcatagccctccggcgcgaaatacgactcccacgcattggcgtcgattccatcggaaactgcgtgcagcagcatgccattgggcgatgcgccgctggggaccagctcgaacttcaccacgctggaggggaaagcgtcgcatgccgcacgttcctcggacgaagtctgagacgcatcgtaggcgcatttgcccacacccgtccaggcataccgcccattggccttctgtttgaacgaatccctgtcataggagccagcttgccattggccttggtgcatggaggaagccgtgctgcagtcggccttcaacgtgtaggtgccgaaggccgaccccaacgttcggtagtcaccggcccaggcggcgcaccgattcgattcgtctttcccgggcagcgcatccgtcgaatacgtggacgcgaatgtggaagagatctgttcgacaatttggtcaccggccgccttctggctcgtggggtaggtgaattccaccgtccgcagtacatccggggcataaagctggtgcaggtaggtgatcgtaccgttctcctcccagctggcgacgaattctcccggcatcaccgccttgtaggagtatttcggatcatcgacatcgaacacatcctccatggccccgttggtcacgttgaacgatccccacgtcgtgatggtcatgcccagctggtcattggtgaacttacggccatcgccgttgtcggattccggctgccacgcgaaatcctccggtacatcaatcgcaaaagcgaaccgcgcattcgtgtagtgcttggtcttcggccgattggtctcgtcgttccggatcgtattatcgttgtcgccgtccgatttcttggccgcatccgtctccttcttggttgtgttcgtctttttatgttccttgatattgatatggctggctgcaacgcccttgccattgtccggccccatgatggccacaccaatagccgcgctggccgccaccacgcagactgcaaccgctgcggcaatcatcggccagaccgagaccctgtgcctgacccgattgccgcattccgtgcaaaacaggtcctcgggtttcaatggccgtccgcattgccggcacaaacgtgcttttgtcatgacacaacaccccgcagatacccgtatcctccaaaatcgatgcgatcataccccagagaaaagccgtcatctggaatctgggcgaacagtggagactgtatgcccttcggatagaacgtcgcatcggaagcatatgagtcattggaaatgcgccatgaatacgtcccatcggcattgcgacggaaagaaccgggcacgtaattcgccacgattccgccatataatcgcgcgtaaccacaatccgcgtgcaaggtgagaaagtcatcgccctgatacagggaatactcatccgcgaaagcggcacagcgcgtcagatcggcgacggtcttcctcctgacgccgtgggtctcgccgttcctgccgtcctccggtacgtccccggtttcatcggcggtctcgtcggacatcgttcctcccggtctgtcgttctgctcttccgagtccatcatagacaacgggatactacatttatgtagtaatcatatataatactacatttatgaagtaatcatatatgcagtggtgcgcttgggtggaaccatgcacgagcgcatatccgacgaactcacctggcggcagtacgccaaggggctcggcatacgcctgcgccgcctgcgcgaccaacgtggcctcagccaggagcgcgtggcctcggacgccggactctccacggtgcagtaccagcggcttgaatcgggaggtttcgccgggcccacgcccaaccccacctccaagaccctgatcgccatcgcccagatcctcgacgtcaccatcgacgaactcctacccccgccatggcccgacctacgcacgaagtgatgtgtcacgaagcgtccccatgtgctagaatcggcatcgtttaaggttcacatagccgccttggacatgaaaaacccaatgattccaagccttgcgaaacctcggcatgtagcccggtggactgttcgttcacgccgcctggccgaggccgataggacatgaccaggtaatgatgagtccggcgaagccggtccttgattgctgggggtgtgaaatagtccttgttaagcccctcaaaattgagggggctgagccgtaaaacaaacagcccgatgggctgtttgtaggcgaaggcgagacgagagtcgagccagaagaatgcgagcggcagcttgtccgtaattgcggtcgagctgtccgtgtagcggactgaggggagttaccggcacacctcagccatcctctctgtaaactcatccaaaaaacgtcccgaatccgcaccaagtgccacatgcacatgcggcatggaatgattcaccagcccaaccgggtctccggtggtccggcctcgtactccattgaaatcaccggtattggtctccgcgcgcaacgcaagatcaaaacaatcgaccagtgaagaatcaagtgcaaccgccgccgccaacggatcatgcaacggcatgccgccagagaacagtgcgggggcggcttccaaatttgccttgatggaaaagtccgcgagatcagccaagaaccgcccgcgcttggtccccgtcgcacgccactggtcggccgccgatcgcggtagcaaacactggtgagtcacatcaagtcccaccattgtgatgtctgcgccggaatgaaatacacgattcgcggcctcagggtcttggatgatattcgtctcggccaccgcatcccaacaattgccgggttgggtaagcgtaccgcccatcatcaccagcctgagtttcggtgcaatatccggtgcccgagtaatagccgcatccacatccgtcaacggcccggtagccagcacggtaacgtctcggccaaactcacgaacctgctcaatcagatactcaatcccatccgcagcatcaacggagcgcctccttttgccccagctggcgagagctgtcgatgtagccgactggggacggtccacaggccgagagcgacccacacgagaacaagaccccgacgccggatgagcatgagcgtcccctaccaaatacccgccaacagaaacaaccccatcgggcacatcctcagacatgtcatccccagacatatcatcaccaggcacaccagctccatcagccagagccccggcccctgccagccaagtattccccagtccatccttcccatgaaactgggcacaccctgcatcgggaataaacgcatcagcccaagaaggatgctcggagcccaaaaacaccggaatatccgcccggccaaacaaatcaagcaccgcgcaagtattggcataagccgtgttcgcatccacattgccataactggcgatcacaccgctcagctcgcactcatccgccgaccccaacaaatacgccaacgccaacgcatcatcaacaccggtatccatgctggcaataatgcggtcaggacgttgggccatggaatcgcctccttgttagcatgattcgctatgaataaccttatcggccgatacgcaaaaatgcgtcctttcctcatgggaaggacgcatttttgcgtagattcaaactcggaatatcggaaattacttgccgaggaattcgtcggtgccaaggtccttggcctgcggggcctcatgaatcaccttgtcatgactgtcagtgtaggcgtcttcttcagccaggaagtcgaagtattcctgagtgcccttgaagtcgttggtgccgagcacgaaagagccgtccttgatcttggccggatcgccccagtactggccgtcgacgataacctgcatgctcttcttgacgaattcgggcttgaggttggcgtcaggggcttcgtccacgagaatctgcgcggcgtcatccgggttggcgtacgcgtactcgtaacccttctgagtggcctgagtgaacttcttgaccaggtcgggattgttcttgatggtcttgtcattggtgatgatgccgatggcgtcggcgttgccgggcacgccgtagtcaggctcggtgaagcagttgagcttcgggccgtacatgtcggcctgcacgccttcccacgtggcgtagaagccgccgaaatcggccttgccggattccatggtctggaaggtggaggtgccgacggtcaccttgtcgaactcgcccttgccgccgtcggtctggatcatgcggcgcaccacggcgtcggactcgttggagccgaaggtggcgaaggtcttgccatccaaatccttaggggacttgatggcggtgttggacgccagtgcgcaccaaatggcgctcggcttctgctgcacctgcagcacctgcttgatgtgagcgcccttcagcgtgtagatgcccacattggtcaagttggacagggcgaagtcggccacaccgttgttcacggcctgttcggcaccggcctgggccacggccacgatatccacgtcaagaccggcgtccttgaagtagcccttgttcttggccacgtacacgccgatgtggttggtatcgggcgcccaggaaagcatgaaagtgaccttcttgaggtcggaggtgttggagttggaggagtcggcggtgttggtctgaccacatgcggcgaaaccgaaagtcatagcaagggcgcccacgagggcagcggccttggatacaaggcttttcttcataatgatggttccctaattcgttgtctctctatcgttctctgggattgcttcgaacggaagtcggcagaaaacgatatggagggccttgatttccgttcgaccagcgcccccgacattccctatgaaagctcaagaaagccggtttgccacacgctggtaaagctgttccattatagagacagggctggagacctcatgagaagccgccccgttcagtcggttctggccgccggcttgtgtctttgacggtaaaaagaactactggtccgcgtcggggtcttcgtcatcgccggccgggccgagcaggatgcgctcgctggcgttcaccgccagcatcagtacgcatgtcatcaggataatgacgatggtggcggagaagatcagcggcgtgcggaacgaattgtaggcagcctgcagccagatgccgaggcccttgcgcgcgccaagatattcagcggtggatgccgtggcgaagatgtatgcggcagatacgcggataccgccatagatctgacgtgcggcaacgcgcagcttcacgtgccagagcgtccagaccggggtcgcgccgcaggtcaatgcgacgtcggaatagaactggggcaccgcttctagtccgcgcacggtctgcacggcgatggggaagaggccgaataccgccacgattacgattttgccggaaatctcaaagccgaaccaaatcaggaacaacggggcgatggaaatcagcggcatggtttgtgcggcggcaagcagcggatagaacgccgcgttgaacgtgtgcgagcagtacagtgcgatgccgatcataatgccgaagaacacggcgaacaggaagccgaccacgccctcatagccggtgatcgccgcggccgggccgagcgtgttccacgtttcgatggtggcggcgaaaatctcgcttggcgcggagatcatcgtgggggagacatgtcctagatccacccacgtttcccagactgccagcaatacgatgacggcgatgacggtgggcatgcggcgcttgaggcgcttggcgatggacatgggatgtcaccttgctttccgcgccagtccggtttgctggtggcgcttgcggccggggcgtggaacagtaaggtgaggagcctgcgcgcctgccggtcgtgtgatggattgtgttatatgccgtccatcagtataggcgaaggcgaacgacaggggcacacaaaaaacctccctctgtgagggaggtgagagagctactccagtccgatggacttcatgtggtggagcttcagggaatccaccttgagactaccggactcggcggcgagcttgatggcacgcggtccttcggaggcgtaggagtaggagctcagcacttggtggccaccgttgacgtagacctccacggagccgcgatccacgaacacgcgcaggtccagcttgccggaggccagttcggtgtcggtcagtggggcggcgcggtagccgtgatcgccgttggccatggcctggcgatccaccaccacgcggccgatctggtcgtcataagccacgtaggtgtaggcaccgtcttcggtggcgtgaatcttcaggccggcacgatcggcagtggaggcagccaagtcgatggtcatttcgatttccacggcctcggcgtcatcggcgatgacctgctcgccatccatatcgagcgtgatcgaaccatggtcgagggtatcctcgcgcaggccttccatttcggcgaccggcgcggtgaccacgtcgccgtcatcgccaagggtgatctcgcgcggcagggtgagctgaccacaccagccgtcatcctccatgggaatcggctgcacgaacgggctcatccagccatagacgatctgacggccgtccacgttgaaggactgtggggcgtagtagttgtggccgcaatcccacaggcggaactcggtttccggcttgaattcgccgcccggctcccacgtgccgatcatgtagccggcgttgttgacgttgcggttcatgaagccgctgggcttggaccccatggcggagaagccaatgacccacttctcgttgccgtccttgtctttgatggggaagaagtcggggcattcgagcatgaacacatccggatccgggtgctggaagagcacgcgctcgtattcccagcggaccatgtccttggaggagaacagccacatctggccgcgcttgtccgcagaggagacaccgaaggtcatgtaccaggtgtcgccggtcttccagaccttcgggtcgcggtagtggtgatccaccttgtcggtcgggcagtcgatgatcatgccctgcttggtggcgctggtgagctcgtcattgtccggcagcgcggtcatctgcacctgccagtcgccgccggtgttgtcgtggccgttggcccaacggtggccggtgtagtagaacttgagcttgccatcgtcgccgattactgcggaaccggagaatacgccgtccttctcctcttcaagggtcggggcgaacatgattggctcacgcttccagttgagcatgtcggtggaggagacgtgtccccagtgcatcgggccccactgggtgccgtacgggtgcagctggtagaacacgtgccagcggcccttgtagaagcacaggccgttcgggtagttgatccagccgccgttggatgcgatgtggaacttcgggtaccagcggttgttgcgttcggcggccatggctgcaacgcctgcttccgcctgtgccagagcttcgctgtggttcttgatttcgtggaggacgggtgc

SEQ ID NO: 3029 - DNA, 10339 bp, Unknown
  R19_24m  MAG No. k141_18408
cctatggctcatcaccgatgaatagaggctgagataccgtcatgtttccgaagccaagtgcccgagatcggattcgaaccgacgacacccgctttaggagagcggtgctctatccactgagctactcgggcaacgacgttttattgtacacggccacacgcccagtcgcatcatgttcgcgtggcagcctgcgtaagccgcatggcagtctatgcaagccacctggcagaacccggcaccaaggcatggccggttttcgtgccggtttggtgcgaactgctcttgcgcatggcgaaaagacaccgaaagacaagccgcacacggtacagtggcaaatcgcacgaaaagcaaggtaacagtaaacaagccggaggaaagggcagcatggcaaaggcacgaagtactaccacaggtgcaagcgtacgagctcgcgccgctgccaagccacgctctgccaaagccacggcacgcccagtatccaagtctgccgtgaagccacacaaacggcatcgtctgcttggttttctcgccacgatgttcgcgcttcttgcccttgccggcactgccgcccgcgcgctgcctgccgatttacaggaactgccatttgtgccgattgtggtatcggcaacgccctggttcacgttgcttggcctgattgccctactgttggccatcgtgtcgcggcgtatccttgccgcactaatcgccatcgccgcaatcgcatgcaatggctattggcaatatccgttcttctactcgaccgacccactcccccaagccgcgcagaacgccgtggctgcggcctcccccaacaccagcgatgcctacgcgcgcgtcatgaccttcaatgtatacaaggggcaggccgacccacaagccatcgtcgaactagtccgcgatcagcgcgtcgaagtgctcgctttgcaggagaccaccgaggatttcgtcaaaaaactcaacgaggctggcattgagcactatctgccgtatgcgcaggtctcatcgtctgacggcgtattcggtaacggcctctggtcggccacgccacttgccgatccggccgacgatgacgtgaattccagcgcctcattcatgcccggcggcacggtggatatgggcggtcagcagattcgattcgtatccgtgcacaccaccgctcccgtacccggctattggcggcagtggaagcgatcgctggatgagttgggtccgatgcgcgggcatacggatacacggtatattttcatgggcgatttcaatgccacttacgatcacacgccattccgtgattttcttggcgaccggttcgtggatgccgcacgtgaatccggacatgggtttacgttttcgtggcctacgaaccgcgtgtatatgccgatgttcgccggtattgaccacgtggtgcttgatcagggcatgaaggccgggcaatgcaaggtggtcaaagtcgagggctccgatcatgcggcgttgttggctaccgtggcggttgggtgatttcgtattcctcggccagccgcatacactgggcacggcttccagaatcgcctcgatgccggacttcttgattgagccgtcatcctttaaatacttcatcaggcgcactgtggatttggtgctggcctcggggtcagggcgagcgccgggagcggcgtcgacgataagcatgtggatagtgttcgaaccgatatcaagcacaccaagtcgcgtggtgcgcgaacgcagattgaccatgatccctattcccgaccttacctaacccgtgatggccgaacaacgggccgaccatcgcaatcagccagccgtgcgccaccatggcgagtcgttcggccggcaaccaacaccgcgaggccagccgaacatcacacaaactcgactaccgtacaacaatcacaccggatgccgcgccgttcacaacgattcgacgaacgttccgagacgttccagcccctcggtcagggcctcacgtgaggcggcatagctcaggcgcacatgcgtatccgctgtggccgcaccgaagtcgcggccaggagtcagagccacatgggcttcatccagcgcgcgttcgcagaacgtccaggcatccagaccagtacgggagatgttgaagtaggcgtagaacgcgccattcggctccacctcaaccggcaaaccgatgcgcttgagcccgtcaatcacaatgcggcgacgggcaagcaattcctgacgacgagcttcacattcggccaaactctccggcgtaaaacaggcgagcgccgcatgctgggtgggcgtgtgggcgcacaggtagtagttggtggccaggtcgtcgaccgcttccagcacggtggggtcgtcgggcagaatagcccagccgagacgccagccggtcatgccgaagaacttggagaagctgttgcacacgatggcaccgggatcgcaggccagtacggacttgacttcggtgccgtccggctcacggtcggccaaatcaaggtaggtttcgtccacgatgcgccatgcgccgcggctggcggccagcttgcacacctcgtccaatacgttgaagtcgatggtggtgccggtggggttggacggcgacgtgatcattacggccttggtcttgcttgtccagtactggctgcacaggtcggcggtcaggtggaagcgggtggcggccgaggtcggaacgtcgatgacccgcccctcaaaggagcgcacaagttcgcggttgcacgggtaggaggggtcggccacaatcacatcgtcaccggggtccacggtcagcgcggtggccaacagcagggcggccgaaccgccggcggtcacgcagatacgcttggggtcgatgtcaaggtcatgacgctcgcggtagaagtcggcgatggcttggcgcagttcaggtaggcccatggcggcggtgtacggcagggcccggccgtcgtactgttcgcgcatggcgtcgcgtacggcgggcggcgcgccgaaatcgggctcgccaaggcttaatttgatgacgctgataccttgggcgatcatcttgtctgcttgttcgccgaataccatggcacggaagggattggcctcacgcgctcggcgggacatgactggagacgcggccggagattggggctgctgcgctgcttcgttttccatatttcggttctatccgcctcacgggacaaggtttcttcttctataatcactgtaggccgattgagtgtaccaacccgtattcaaggaggaataatgagtcgattcaatggcaaacgcgccgagttcgaggccagcggcgaaaagatcaacgtcgcgattctgggtgcgggccgcatagctcacaccatggccgacaccctgacccagatggctgaaggttcactgtattcctcatggattcacccgtatgcggtagcggcccgtgatattacgcgcgcgcaggcttttgccgaccaatggcattttgacaaggcttatggatcgtatgaggagttgacggcggacccggatgtggatctggtgtatatcgccaccccgcacagtctgcacgccgaacaggcgatcctgtgtatgaaagccggcaagaacgtgctggtggagaagtcgttcaccgcgaacgccgggcaggcacgtgaggcgctggccgtggccgaggaaaccggcatgctgtgcacggaggccatctggacgcgctacatgcccagccgcaagctcatcaacgaagttatcgagtccggcgagatcggcgaggtgaaagcggcgagcgccaacctgtgctatccggtgtccggcaaggcacgtatgaccgatccggcctgtgccggtggcgcgctgctcgatgtgggcgtgtatccgctgaacttcctggatatggcgatcggtgccgaccatggccgcacgctggaccatttcgatacgtcgatgatggccgccgaaaccggtgtggatgcacagaattccaccacgttgtattacgatgatggcacgatggccgtgtccaccagttcgatgctggtttcctccgatcgcggcggctacgtgtggggcaccgaagggtatttggtggtcaccaatatcaacaatcccgagtccatcgatatctacaacaacgatcacaagcccgtgcgcagtgttgcggtgccgtcgcagttgaccggttatgagtatgaggtggccgatgcagccaacgcgctgctggatggcaagatcgaatgcgaggcgatgccgcacgccgacaccatccgcatcatggagctgatggatgcgattcgcgaccgttggggcctgaagttcccgtttgaggtctgatttcagctcccctccagaggggagctgaaattattccgctgaatctgcatctccttcaacaatctgctcatacagccgtgcgaggcgttcgtcacgcacggctttcgttaattcgcactcccatacggtaattacacgccagccggcggcctccagttcagcccgctgcgcgatgtctcgattgtgattgcgcagtagcttcgtctgccagaattccacattcgatttcggcatcgaatgtttggaacagccttcatgcatgtgccagaaacagccgttgatgaacacgatggtgtggtatttcggcagtactacatccgggtggccggggtaacgcttgtcgttcttgcggaatcgcaaacccttgcgaaacagatagctgcgtaccagcacctcgattttggtgtctttgccacgaatatgcgacatcgtgtacgaacgggtgccccgctcatacttctccactggctgtttcttgcgattcacgcactccagactaccgtgacgttgcggcgaggatgaaagcctgaacgaacaatcacccatcttgcccgtccgtgtctcttatcgcgggcaatgatcatctgccggtcgagactgcacgattagactgaatcaaatggatgacatgatgattcgtagggccacggcggccgatattccccaaatcgacgaactgctgcggcaggtgctcgaagtgcatcatgccggccgaccggatctgttcaaaggcggtgtcaagaaatacacggacgaggaattgaaggcgattctggccaacgatcagacccctgtgttcgtggcggttgcgccatctgccaatgacggcactgacgtcgaacataacgccgactcccccgccaccgaccaagtgcaatggcatagcgccaagcgacgtctgctttgcgagatttgcgagagatgaatgcgataccagcgttcatggctatgctccttaatccaatatcaatggatgaacctgcactgccccgtatgtcaccatcataatatatcgaatatcaatataaagatatcgaaaatcactttcaccattcacccacacacaccgcgacgcgatcgaccgttcttgccttgctcgcagcatccacgaccaacacgggaaagtcactttaaaaaagcactttatcaatgtggataactcggaagctagaaccacatacccccgttcagctcgccaatcagaaacctcatcccataccgtcagatgcacccgcacgcaacgacgcgtcagacaacagaaagaaggaccaatgaacatctctacgtttacccacaactcccacccggcaattcggcatacgcattttgtctagtgcgagattgagagttatgatgacacgaagaaaactcatcatcaagaaacttcggcaagcggcaaagcagcgagggctcgatttctatttgttacggcaaggcagcagacatgaggtttactgcctggacgggttgggatacccatcccccgccataatgaagtctcagaacgaaccacgctggatatcatcaacgagagcgagcagaaactcggaaaggggtggtggcaatgagcaactatgacgtgcttgtgcaacccgatggccgatattggtacgttcaggtaccagctatcgaacggtcgacccaggccaaaggacttgacgatatcgagccaatggctaaagatctcatcactgtcatgaacgacgacgacaatccggagctcaaggtgacgtttgtgttgccgaaacaagccaaacaacacgtaacagaaatgttccggcagcgcgaaatagcaaaaaaagccaacgcacaagcggctgccgaatcccgactcgccgcacgggccctacgcaacgagggactcacgtatcgacaaatcggagctttattgggggtctcctaccaacgagcatttcaattggtcaacggcaaaacaaagcacaaaacgacagcgtccgaatcgcctcagccaacaactgaatcacgctccccacgcacgcaccatgccacaccgctatcgactccggtctcggcttagcgaacgggtccacaaagcccagactgtttccgcctcccaagctcaagagcaccgagcaggatcttctcatcccagcagattgaggagatcgtccttggtgagggtggcgatggaggcgggggcttcggtgagggcgctggcaccggtgccagcttcgtcggcaagcaaggaagcatcggtgaactggcgggcgagctcgctcttggtatgctgaagctccaagatgcgttcttcgatggtgtccttggccaccacctgatacacgttgacgtcttcggtctggccgatacgatgtgctcggtcggtggcctgatcctgcgcggcagcgttccaccatggatcggcgtggatgaccacgctggcaccggtcaggttcagtccggtgttgccggccttcaatgaaatcaggaaggcgggcgtatcgtccgcattgaactggtcgacgagttcgagacgcttctttttaggcgtggatccggtgatggtgtagtagcgtagtccttgcgcgtcgaaacgttcggcgatcagatcaaggaagctggtgaactgggagaagatcagcgccttcttgccttcattcacgcaggtttccaccagttcggtgatggcggcaagcttggccgactgatccttggcatcggcatacagcagccttggatcacagcagatctggcgcaacttggtcagctcggcgaggatgcgaatcttcgacgtgttgaaatcggcttcttcgctgtgttcgagctgcattctgagccgctgctcgtgggccgcatacagtttgcgctgttcgccggcaagctgcacggtcagcgtggtctccaacttgtccggcaaatcggtcagcacttgggacttcaacctgcgcttgatgaacacgcccaccaacgactgcaattggcgagacacccgggcggcctcaggattgacctgtgcggcggcccgaccttcggccgtgctgccatctgcagcccgggcgttggagatgggcaactcgtagcgctcatggaatcgcttgtatgagcccaatagtcccggcatcaggaagtcgaagatgctccacagttcggagagtcggttctcgatcggcgtgccggtcaaggcgaaacgatggtcggcggccacggccttgaccgctttggctatcttcgtggtgtgattcttgatgtactgggcttcatccagcgccatgacattgaaacgttgctcattggcggtgtaatcatcgacatcccggcgcagcaggtcgtatgaggtgatgagcacggtgggttcatccgcccggaacgcgcggccgatggcggtgcggcgctcggctttggtaccggccaccaccacggcgttgaagctcggggcgaacttggcgaattcggcaccccagttgtacaccaaggacgccgggcacacgatcaatgatggatgcggcccgccatcttcggaatcgaaagtaatatgaccggttacggctgattcactattaacagcattaccggcatccatgccttgagcggtcggcatgccactagattcgttgtggtatcgcgacagcaacagggcgataagctgcacggatttgcccaaacccatctcgtcggccaaaatgccgccaaaacccttgtcgcacaacgtgttcagccattggaagccttcgacctgataagggcgcagaatatgcttgagactatccggcacttcatacgacttagggtcgatgatcttgagatcgtcgatgtattcggtgaacgaagcgtccttgactacatcggagccgtcatccggcagctcaccatccagtaggaatgctcgaccgcccggcaactcgatcagcccggagttgagctgctgctcgctcagatcaaggtcgctggccaatcggtccaacgtgctgagattcgcgccgctgagtttgaccagcgtgccgtccttcaaatgatggaatcgttgacgccgacgatacgaagacagcaaggcacccacttcgtccggcggtacttcatcagcgaggggtgatatctccaccaaattgcctttgatggacaatccgactttgacgcttggcggcttgggcgcgatcagccggtcaaaagccggtgtggtgaagacctcccctacttccttcagtgcgggcaatccctcgtcaaaaagacgaacaatctgcgtggtgtcatcgcgatcgatagtggccgcatcagacacgaattgtttggcggtctttcgcgcggccggcgttcggaacccattcaccgtctgatgagtggcggccgcaacgcgcttgcgctggtcaggcatggtaaagaattcacgcactacatcaatcgcaagatgctcagcgtcgaaatcacgcccaatcacgccccgagacaaggggatggaacgctcatccctagcatgcaccgtcgggccatcgggtagcaacgggacaatggcatcgccgtagtgtgccttgacctcgcattgcacaccatgctcatcacgatccagataaaactggaggctgcattccgtaggacttaattcagccagctcgcgaggaatctcactggcctccaacagtccggcaccaaccagctgaggcaatagcgtgcgtgcgaacagggcgatgtcatcaccggcaatgacctgcccctcgccatcgggttcaaacaggtctcccaatagtcctcgcaacggaatcaatcgtttcgggcaacggacgaatcggcatcccgctgcgcttttacgctgagagcccgccatcatggcggataccgcaccggccggattagtggaggcgagcaacagccatacatccttgccaccatcaatcacggtttccaccgccggcactccggcaagcaggtatccggcatccggaccatacgtattgaaatcacgccgcgcaatgcgcataagaaaatctggctcgccaccatcaaccggcaccgatgcaggctgcccggagaaccatgtgttcaacacgagctgtacgcctctgccctcacgtacggacagcaaccgggccacttccggtgctgaaagtgtcaggtgacgatcgatggcgatatgcccgtaataccggtcctgctgctcggccgcacgacgcacggccatcgcgtcgtcaaggaagcccagcagtgggcgcgaatcatcgtcgaacatatccggcgtatgggtaaaggcaagcttctgcccataatccgtatagtcgccgttcgccatggtaagcacaaattgcggaatcgatttcagtacatagctggacccattggaagtcgatccgatcttgaactccacgctccacacgccatcgatgaaactcaatatcggaacaagctgcacctgccccaagcccacagtctcactatcgccctgatacccgccgcctcgggtgccggcacgagagccgtatccgctattcgtacgtcgtccacctgcgccatttcgtctttttgcagtatcgaatcggcgcatgagcgcattgcggcgacgcgctttggcttgagcatcttgcctatcgacgtgctccatatagtcgatcagcgtccgagacggcctcacagccccggcacggtacccttcaaaacgctgcggatcatcgcagaatatgaaggcgagcgcaatcatgtgcttgcacatgccatagccacggccgtaagccgggcatgagcacttgccaccgacggcttctcccgtatcgaggtcgaattgcacgctggtacgatacctactcgatgggctggtggtgccacgtagaataccgtcaagctcggcatacccggttcgatgattttcgctgtataccggattgataaccatggtggccgctttgcgcgcaatgctacgggcacgagcgagcacggtattcgacgatgacgattccacatcgttgcgtaacgcaaggatagggacggcatgggcttcggcacgcttcgcagacccggcgaaatggccttcgtcctcatcgtcgaaccatacggaacgtccttgcctgaaacgatagggcatcaccgcatcggcggcggacaaactgtccgttcc

SEQ ID NO: 3030 - DNA, 12329 bp, Unknown
  R19_24m  MAG No. k141_18441
ctgcgccttgccgtaggcggtccagtcgccgttcttcatggcggactggctgtccttcatggcttgggcggcatcgttcaacgcctgctggagttcggggctgcggtcggaagacgagccggaatccgactttccgtccgtggtgccggactgaccaccattggtatcggaaccagattggtcaccggacacgttctcggcatcgcccgcggccgcaccggaattgccaccgaacacctgatccaaggcctcatccaacgtatccgcgaatccaacctgatcaccgaatgcgaccagcgtcttcttgagcaacgggaatgaggtcacgcccgaagacttgacgtacacgggctgcacgtacaccagtccgccaccgagcggcagggtgagcaggttgccgcgcaccacttgcgtgtcgccggattgcagcaggttcagttccttggatacatcggcgttggcgttgaagttgttctgcgcctggccggggcccggtacgttcgaatccttgggcagctcctgcaatcggatggtgccgtagttcgagcctatcttgcccttctcattgccggcatccgagtcgaccgacaggaagccggtcaggatctcacgggtggactggccagccggaatgtaggtggaggtcagcgagaacaccggttcctcggtgccaccggtctgcaaggtcaggtagtacggcggctgcaggatgtcctggtcctgctgggactgggattcggtcggatcgaccggcgtctgccagaagtcttcgcctgagtagtactggctggcagaggtcacgtggtacttggagagcagctcgcgctgtaccttgaacaggctttccgggtagcgcatgtggctcatcaggtcgccggagatatcggagagctggtggtactggccagggaagatcttctcccatgccttgatcaccggatcggattgatcccacacgtacaggtccacggaaccgtcgtaggcgtccacggtggccttgaccgagttgcggatgtagttggccttctgagagcccagggacgagaccgttgcggaagagacggtggtggaatccttggtggcggagccgaggtcggttatttgcgagtacgggtaggcgtcggaggtggtgtagccgtcgacgatccacttgacgcggccatcgaccacggccggatacacgcggccgtcaagcgtcaggtacggtgccaccttggccacgcgctccttgggggaacgatcgtagagaatctgcgattcgctggtcacacggtcggagaagagaatctgatcggagccgaagcggatcgcgtagagaatcctggagaacaggttgccgaccgaagggccgccgtcgcccttgaacgtggtcagagcaccttccgaaccggtcgggtagtcgaactcccaagcctgcgtgccttcaggggcaccgacaatcgagtattcggtggtgttcggcgagaagtagatgcgaggctcgtacttttcggattcggtgagcttgccctgggtggggatgccggattcgaagaattcgggctggccgtcggcggtcaccttgttgccgtaggcggccaccacgccgtaaccgtgggtgtacacggtgtggtcattgacccagttgcggttgtcattgccggccagatcgagctcgcgggcggcaatcacggtgtcctgggagacgccgtcaatctcgtacttgtcgaccgccagggtgtcggcgaaggtgtagtactgcttggactgctgcaactgtttgaacgtggggctgacgacctgcgggtcgagcagacggatctgcgcggtggtgtcggcctccttggccagagcgccctgctcacccttgtcggtcaccttgtattgctcggtcttgagcttgtcaagaccgtaggcggcgcgggtggcgtcgatgttgcgctggatgtaggtggattccatctcctgtgcgttcgggttgacgcggaagcgttgcaacagcaccggccatgccacggtgagtacaagacccaccacgaccacgacggcaatggaggtcaccggcacacgccaggccttgagcgcggcggaagcgcgcacgccgatggacgcctggccttcgagcgtgtgggagcgcatgagccagatgcccagcaccacgccgaggatggcggtcagcacggccatgatgaaggtgacggggatgttggcatgtacggcggtgtaggaggcaccggtgatgcgtgaaccctgcacggtgagctggtcgaagacgccaatcatctggcgcactgcccaagcgaacatgttgagcatcagccagatgccaagctggcgacggcaacgcttggtaatggagaacaggccgcgtccgttaaccggcatggtaatgcggataccgcccatcagcacatgcgtgaccacggaaaacacaaggcccacgcccagcagcatggccacggcggcgagcacgagcttcaggcccggcagcacgaacacgtagaagccgttgtccagaccgaactgcggatcggtggtgccgaacgactgcgcgttgaacatgagcagaatctcgctccagttcgcgttaaactgggaaccgaagatgacgccgacgatcagcgaaatcaccacggccacgcggcgagcggttttcgagctgacggatttgccgacctcgaccacatcgccgttaatgcgaatggtggaaccgtcggccgaatcagggcgtgctcgaatggccagccaggcggaaacgaagccggtcagggccatgagcagcgcgtaggccacccacagaccgattttcaccccgagctgggtccagaccacggactggaagccgagctggccgtaccacatcagatcggtgatgaatcgggacaggccgaagaacagaccgacgatgatggccaaggccagcaccacgccgatcagaatcttgctgccacggctggctcctgagccaccggacgctggcttacgggtgatacgcggattggccggaccacgtggagggcgggatgacccggaggggccagcgttggtgttgtgggccggaccgtccccatcggcctcgacatcgaggatgatcggatcgtcattgttcgcattgttgcgtcgtgaatcgccgccattgccgaacagtactgagaaaggatcgttaaaagacataactcaagcctatcgaaagggcgggaggtcggttatgccctgagcacagaatgaggcaacatcctgttctacgctctgttctacgcttgccgctatgaacagacaacggccacaacatatgcgtccctcagcacacgccacacgccaacttcggcacaggagcattccaatcgtggcggcaatatgtgctttggcggtggtgttggccggtgtggcagtctacggatggcatgtcggatggttcgccaaatccacatcaaacggcaacaccaccactccccagacctcccagacgagtgcgttaccgcgcaccgacgttccttccccgaagaagaacgacgatccggcggcacaagcccgacgtgcggtatccgccatgacgcttgaggaacgtgtgggacagttagtgatggtgccgttgttcgccggttccgaaccctcctcgttggcttcaacaatcgccgacgaacacattggctcggccattctcattggcaattggaataccggcgtcgatacggtcaagaccgcgaccgcgcaactccaaggatatgcgccggccggcaatcgtctcatcatcgccaccgatcaggagggtggtcaggtacagcatctgactggtaccggtttcgacacaatgcccagtgccgttgagcagggcacaatgtccgctgacgcattgcgtcaatcggcaggcacgtggggttcgcaattagccactgctggcataaatgtcgatttggcaccggtgcttggcacagtggttggcaatcgtgcctcaaatgctccgattggcgcgctggatcgtgatttcggattggatgcggccggcaacgccgaacatggcatcgccgttattgaaggtttgcgagacgctcaagtcggtgcggcggtcaaacattatcctgggttgggcgcggtaagcggcaataccgacttcaccaccgaaggcattctggatacgaccaccacgttggacggggccgaggcaggtgcctttgaccaggcgattaccaaggccgatcctgcaatggtgatgatgtcgttagccacgtatcaatccatcgacccgaataatccggcggtgttttcttctacgattatcgacggtcatattcgcaacgtcctgaagtacacgggcgtggtgatttcggattcgatgtctgccgaagcgttgagcagctacgatgtaagccaattgggagtaaatcttgtcgaggcgggcggcgacatgccctgcatcggtcagacggattatgtaaagccaattgtggacggcctcaacgaacgggcgaagtccgatccggctttcgcttcgaaggtgacggcggcggcgactcgcgtaatgacattgaaaatcaagatgggactgacctgaccgttcatccttgcactggcgaggattgatgcgcgctgattcgcgctaatcctcaccagccctcgtacaaatgcacactagtcctcgtacgaatcgtcagtcctcgtacgaatacagaccatgcttgccgatgtattgcaccacgccgtcgggcaccagataccagaccggctcgtcgtgttcggcgcggcggcgtacatcggtcgaggagatggccaaggccgggatctcaagcgtatcgaccttgccttcgggcaaggtcacgccgtccgggctggagtagccggggcgcgtgacggccacgaagtgagcgaggtcccacatgaggtcggcgtccttccactgcatgatttcggccacggcgtctgcgccggtgatgaagaacagctcggcgtcgggatgttgggcgcggatatcgcgcagagtgtcgatggtgtaggtgacgcccggacggtcgatgtcgacacgcgagacggtgaatttggggttggatgcggtggcgatcacagtcatcagataccgatcctcggcgttggtgacgtgcttgtccagcttgaacacaggtcggccggtgggcacgaaaatcacctcatcgaggtcatacacccaggcgacttcagaggcggcgaccaagtggccgttgtggatcgggtcgaacgtgccgcccatgatgccgacgcgcaggcgtgtatgccagttgccgcgtgcggaaagcctgcctttgccgtggctgctggccccggccggtacggacaggtcggacatgcgccgttcggtttcgccttgggtgacggcaatgatttcggcgggctcggcggattccaccgttttttcggactgaactgacgcagccgttttgtggctgccggtaacaccactcatgcctggccgccctcgccggcggcgtcatcggctgattcggtttcctcttcgatttcgccggcggagggattgtcttccttgggatcgatcttgcccatgtcttcatcccattcatcttggaccacgcgacgaatctcggcgaaggtgggcagcgggaagtccggctggtagaggcggcggacctcggccacgcgctcggtgatgcggatgagcgtgtcggtcatgccgtcgaggtcgccgtcgtgctccatctggctgtatttgccgatgtagccttccatgagttccatgtgttcgcgcacgatcttgagctgggcatcgttgaggtccacgacttcgggtgaatcggtctcgggccagccgatgagcacggcgtccgcgtattcgagcgacgcacgctgggcggcggaggcgatgccgtcctcaatctgcacgaggaacacatagcggacgatgctgagccgttcggccgcgatcttcaggccgagcttgggatcgttgaggtcgatgtcgggccgcagttcacttgccttgtttgccgtgtcagccgtagtgttcatgttgccgtcctcgttcatgcgcgcacctggcctgttccgtaaccgatccacttggtggtggtcatctcccgcaatcccatgggaccgcgtgcgtgcatcttctgcgtagaaatgccaagctcagcaccaaagccaaacacgccgccatcggtgaagcgagtggaggcgttgaccatgaccacggccgagtcgatgcgcttggcgaattcctcgatggccgcataatcctcggcgatgatggattcggtgtggcccgtggaatgcgtgttgatgtggtcgatggccgcgcccagatccggcaccaccttgatgcccatcttgagggccagatattcagtgtcccaatcctcctcggtggcgcggttgaggtcaaggccctcgatcgccgcgccggagatgatgtcatacgacgtggtgtcggcctgcagtacaacgttcgcctcggccagagcggcggcgatctgcggcaggaattcggcggcgacatccttatgaaccaatagcttctcggcggcattgcacacacccacgcgctgggttttggcgttgatgatgatcaggatggccttggcgagatcaccggacttgtcgatgtagatatgcacgttgccggcgccggtttcgatgaccggcactttggagttgcgcacgacggcttggatcagacccgctcctcctcgcggcacgagcacgtcgatatggcctcgcgcctccatcatggcggtggcaccggcgcgtccgtactggtcgacggactgcaccagtgcggattcgaaaccgtgtgcttcaagcaccggggcgatgacgcccagcgtggcagcattggtgcgttcggcggcgtgaccgcctcgcagcaacgcggcattgccagatttaaggcacaggctggccacgtccacagtgacgttcggccgggcctcataaatcatgccgatgacgcccatcggtacgcgcgtctgggtaaggcgcagaccgttgggcagattgtatccgcgcacgatttcgccgaccggatcaggcaaggtggccacatgacgcacgccttgggcggcggcggccacgcgcggcacgtcgaacagcaggcggtcaagcttgcccgcatccatgccgttttccttggattcgagcatgtccagcgcgttggcggcttcgatgtccgcggcgtgctcgtccagcgcgtccgcaatggcgagcagcagttcgtttttggcttcggtatttgcctgtgcaagacgctcctgtgcgcgtgcggcctgatcggcctggcggcacaccgcgtcgaacacctcaggactcaattcatcgctcataacagtcaagcgtaactcacaacgcggctgattgcttactccgacccgcttgttatgggatgtctgacgttttgaatcgcaaacagaaccggctcccctccatctcaggcgggaagccggtgacgtgatgcgctccggtcagcgaatcatcactaaccggtacaccacggtggattagcgaatcagcaaatcagtggatctggtccaggtcggggtagagcgggaagtcttcggcgagcttgtcgacgcgagccttcagcgcggtcacgtcggcggacggtccggcggcgagcgcggtgccgatgatgtcggccacctcctcgtattccttcggcccgaagccgcgggtggccagggcggacgtgccgattctcaggcccgaggccaccgaggccgggcgcgggtcgaagggcacggtgttgcggttgatggtgatgccgcaggcggcaagcagatcctcgccctgctggccgtccatctcgctgttgcgcaggtcgaccatcaccaggtgcacgtcagtgccgccggtcagcacgctgatgccgttggccttgacatcgtcggccaggagacgttcagcgagaatcttggcgccgtcgagcgtgcgctgcatacgatctttgaattcgggggtgccggccaccttgaagctcacggccttgcccgcgatcacatgcatgagcggaccgccctgctggccggggaacacggaggagttgagcttcttggcgtattcctgcttggcgaggatgaagccggagcgcgggccgccgaaggtcttgtgcgcggtggaagagactacgtcggcgtacggcacaggactcgggtgcagacccgcggctacgagtccggcgaagtgggccatgtcgacccagaatttggcgccgacctcgtcggcgatctccttcatggccttgaagtcctcgatgcgcgggtaggcggaccaaccgccgatgatcatggccgggtgggtttcgagcgcacgctggcggatgatttccgggtcgatgcggaaggtctcggggttcacgccataagcctcggcatggtagaagcggccggagaagttgattttcatgccgtgggtcaggtggccgccgtggtcgagggccaggccgagcacggtgtcgccgggcttgacgagcgcctggtagacggcggcgttggcctgggcgccggagtgcggctggacgttggcgtattcggcgccgaacagggccttggcgcgttcgcgggcgatggtttcgacttggtccacgtattcgcagccgccatagtagcggcggccggggtagccttcggcgtatttgttggtcagcacggagccctggcattgcagtaccgctcgcggcacgaagttctcagaggcgatcatctcaaggccattgcgctggcggcccagttcggagtccagcagttcggcgatctcaggatcagtttcgcagatcggcgcgttgaaagcatcggtcgctttctgcgcaaggggtgaagcggtcatgggtgctcctttttggtatgggcgacaattgattcgccgttgccgccttactgtatggccggtttgtagccggcctgtttcatgatatggccggtccccgttcgatggcaatggtgattttcgccggtttgaccggtcggctatgcgagacggacggcccttctgcccacggcccacgctaaactggtgtggattcatcatccctttcaggcagaaggattcatcgtgacaaccaccttccattccacccgtagcaccaccgattcgctgaccgccaagcaggcgattcgtaagggcatcgccgatgacggcggcctgttcgtttcggacgcgttgggcaagaccaaggtggacgtggcctccctgccgggcaagtcgtaccagcagatcgccgccgaggtgctgggcgcgctgctgccggacttcacggccgaggagctgggccagtgcatcgccgacgcctacggcgaacagtggtccgatgagcgcatcaccccactcaagcccctgggtgacgattacgtgctcgaactgttcaacggtccgacttccgcgttcaaggacgtggcgctgcagatcctgccgcgcttcatggcgcacaccacgccggccgatggcgacgcggacgagaagatcatgatcctcaccgccacctccggcgacaccggcaaggccgcgctggccggcttcgcggacgccccgggcaccgcgatcaccgtcttctacccggaaggcaaggtctcccaggtccaggaactgcagatgaccacgcaggccggctccaacgtgcaggtggccgccgtggaaggcaacttcgacgacgcccagtccgcggtcaagcgcatcttcggcgaccgtgccctggccgagcgtctcgccggcaattcgcacgtggtgctttcctccgccaactccatcaacgtgggccgtctggtgccgcaggtcgtctactacttctccgcttacgcccagctgctcgccgaccaggtgatcaacgtcggcgatgaggtcgagttcgtggtcccgaccggcaacttcggcgatatcctcgccggctactatgccaagctgctcggtctgccggtcaagcacctcgtggtggcttccgacaagaacaacgtgctgttcgacttcctgaccaccggtacctacaaccgccagcgcccgttcttccagaccatctccccctcgatggacatcctcatctcctccaacctggagcgcatgctgtactacttgtccgagggcgacacccgtctgatctccatgctgatgaacgacctcaacaagtggggcacgtacgagatcccggaagaactgctggccaagattcgtcagatcttcggcaccggttgggccgatgaggatcaggtacgcgagtccatcaaacactgctgggacgagaaccactacgtgatcgatccgcacaccgcctgcggctactacctacttgagcagatgccgcgcgacccgctgaccccgcgcgtgctgctctccaccgccagcccctacaagttcccgcgcgtggtgaacgaggcattgggcttcgacgccaccggcaccgacttcgagtgcatggatgtgctggcccacgagaccggcaccaccgccccggccgccctgcgtggtcttgagaccgccgacgtgcggttcaaggacgtcgtggccatcgacgacatggaggactacgtggagaaggccgcccaggcgctgtaaaacataccagcacattggctcccctcagagcggggagccattttttacatcagaattgcgtttacatcagtatcgcggcgactggcagtcctatggcgattgccaacagcacgatagtgccgatgatcacgctggggcgtgcgaggttgacggtccagccgacgccgaaacgtttggggatcatgatggcaggatcgtcacggttgatgtagatgatgccgccaatccagtgcaggtcatcgtcatacggcatggcattatcgtccgaaatgtcaccgccgtcactgtgccgaacaccggcatagacgcgcgccccgttctgcccgtaatacacgccgatcatcagcgcgccgaccagagccgccacggcgatgaacatgccgatgatgccgattagattgatatccagcacgccaatggtgacaagctgaacgcctaggcccaatccaccggctgccagcagtccgatgaccagcacgtagatgctccagacccgcgagaacacaccataggcatacccggtggcggcggggtggtcgggatcaatcgggtgcttggcgtagatgatcgcggcatggctggccaccatcaccgctgccagcaccacctgcgcgagcacggcgtaccaaatcaccatcggactcttctcggcccaaccgttcacattgccggcgatatccgcatgaatcggcacccgctccggcatccggtcatagcccagcaacccgacagcaatggtgacagcgagacaaacgacttgcagcaattcccacttcaagctcatcgggtcgggattgtcccgctcacctatcaatgctgcacggcgggcactggacgcctcccatccctgatcgactttgatggatagtactttgcggcgaaacatctgctgcagcacgaaaccacatatcgcaatcgccaccgctgcgatggacacagtccagaacgccgcgtcgactccgcagagttgccaaacggccagcgagaccagtatggcgcatacgccaagcgccaccgtaattcccgaaaacgcgactttaaatccgcgaatgcgcgtattgacatgggcggcggccggcactgtgacaccgaacacctcatgccggtcggtaacccatggaacccctgccaggccggcggtcactatcaccggcaacagtaaaaacgcacacaacgcgatgttcatcgacacgactgtattattcatcgttatctcccctgatttccttttgttgcaccgtcagtaacgctctgcgaggagcgcacgccgtatgcccgttcgcattgccgtttggtggcatcgaggaatgcggccgaatcaccgccgcgcgccctgtaggccaaggcaaggcgatagagttcctcgcccatccgctcatcctgtgcttcggcagttcggttcggtgcttctcccccgccgtcatgctcggcgacggttgcaccggcaccacgacgcataacgatgtatccctcgtcacgcaacagcgcataggccttgttcaccgtgtgcaggttgatgccaaggtccacggccagcgagcgcacggacggtaacgagtcacctggcgacagctcatcgcccgcgatggctgcgatgagctgcctgtgcagctgctcgtaaatcggcacgtcactgcgctgatcgatttccacaatcacggtcaattccacccctctcaagaactgttctatttgttctacatcaaatataacagttttgccgtatgagtcaagatatgcgaatctcggttgaacatccggcaatgggccaacggcgtgttgcttgaattttctaggaaggcgggaatcgccatgctgccggcgaatgggaa

SEQ ID NO: 3031 - DNA, 7212 bp, Unknown
  R19_24m  MAG No. k141_18959
ctttgaacccgtactggtagctgatggtcaccggcgtggaatcgggaacgtacaccgtcaatacgccgccgagtttggcatcgttttcctgatatacgatcgcatccgaggatggctggtacgttttgccggccgggcagggctgcccgttgcctatccaggcgagacacacggtcacgtttcccaggaacgtgacctgcggattgctgccttccggtatggcgggcacggtcagcgcgtctttgatgggcagcatatcggtatcggggacgccatcctgtttcgcatgcgtggcatcgatattcagtccataccggttggcgcgcacataataggttctggtgaagcttttgccgtcggaggaccagccgctgtcgacgttctgcttgtcttcgacgccggtattggtgttctggaaattatcgatgaaggtttccgacgtggacacggaaggtatgctgccggatcccatggaaatcgtattacggtacttggccgtcaggcaatcgccggcaccgtttttcagcgtgggatcggcgacgcaaccccgtttgccatcgtatttgccttccgcccagtacttgccgtcgttgatgtcgggagtgcgtgcggccacatacagatacacgttgccctcgttcatgaggtcggtcgcctgttgggggatggtgatctggtacgtgcggtcgccggtctgcttgacggtaacgacatattgcacaccctgggtattggtgaaccgcgtctcccccacggtaagccactgtttgcggtcgccatgatcggagaacgcgaacttcacgtcgtgcaggccctccggcagggtttccgtgaagacgagcggcgcgcgacgccaattgtcggtcacgtgcgcgctgatacgccatcccacttgcctcacggacaccggatcgggggtggcggtacgtgtgtagtcggcaccgttggccgagcaggaggtgaatttgggatttccctgtccgtcgaccggatcgccgcaaccgtctttgaccaaagaggcgacttgcacactggaggtgacgggtttgacgaacgatccgccgacgccggttcccgcggtggccgaattcttacgcacagtcgtttcgctggaatcgaacaggctttgataagtgatcgccgcggttttgccgggggcaagcgcgttgtcggccacgaaccggaaggacgtgtatcgctgtgattcctgcgctttgttaaggtctatccaggtcctgccgttgtcggaggacacttgcgtcgctccggtcagctgcttaccgtcgacggtcacgcgcagactgtcctgcagcagttgcttcgtgtaccagacgccgctgccggtgtcctgcatgacccatcccgccggcaattgaccgtcgccggcattgcgcaccgagacgctccacgacgcaaggccgcagtgaccttccgtcacgcccatggtctggcattgctccgccgagggggtctgctgcccgcccgccgttttggtgagtgagatccttggccgcagcggattccaagcgactgcgttgttggtgaaatagtcgcctccgttattggaacggacgaaccgcgaaatgtttttcgaagcgggatacagcacatcattggcgaacgtcgaatcgtattgcaacgtcaacgtctgccctgcgggaatcgaatacgaatccggctggaaaacccatttccaataggttcccgtggccaatccgccggccggccatgtgacggcgggtccgcccttgtagttcggcagcgtgaccttatataccgtcaacgtgccgtgccccatcgttgtggtcaacgtttggtacagatcgttgatgttctcagccgtgtaccatcctcggcttaacgagatggaaccggcgttcggttgatcaacgttctcatacgccatccaatcctcgatcctcacgattggctggtcgatggttcccgtgttgacgtattgcgcctgccatctggtactgagcgttccgtccggttgcagcgtcggtgtgccgacgacctgcttggaggtgctgccgcttctgcggtacatggtgatggtggtggtatggccgttgccgaaatccaatacggtctgccccggattattgccggtcaccttgctgcgatcggcttcgatgtacaatcggccattgtccagcggggcggcggcgttcttgctgatggcgtgctcgctgaagacgatggtcaccaatccgtcgggagcgatcgtgtacgtgccgagatcgtcgttgagcgtgcccgacatggcggtaccggtgccattgaatcccgcgatatggtatcggaacacgtggttgtcttcggtgatgcttcctttgggtatgacgaattgcgcgtcaaaacggaattgggctattttcgtgctgtaatcgaatgagacattgccgtgttcatccgcgggaacgttctgccattgcgtcgaattctgcaatcgatattgcactgcggcattgctgatgcagccgaccaatcggccggaaggcttgctggaatcaacgatggcaccctgttcgtcctggttccaaggacgaccgcacgccggcgtctgttgtgcggcatcgacagccccccccccgtcgacggcggcggccgtggcgaccggtacgatcatgccgacgaccagcgcgacagccgtcgccaaccgcgttaaacgtgtgaccataccagaactccgcacatactgacggttcatcgcttcgcgcgaaccatcgtgagatagtgaccgcaagggatgcgcttgtttgaatgcgtgccgaagcacacgtccctaaacgcgaaaacgtaaccctttattcaacaaatgttatcatttgtatcatatgtcggcatatctttgtgccgggacatggaaccggtatacggccgcgcctccggccgcgcgcgtatacgaatacttcgcgccgctttccgcctctgtcaggaacagttacctgaataaaccggacagttggctccatagcgacggcttgcgcagcaaatcatcaccctcgccctcgccaggcgcggtttggttcaccgcataggtgtaggcgcgtttggaactgggcttgcccaccagttcgccaaactccagcaattgcgtacgcggctcgtaagggtgacggatatcaaattcgatcaatcgcgtggcacgtttggccggagccggtccgtacgtattgaatccgcaggttggcgtagcgataagcaacagaccctcatgttcgccgacgaagccgttgcgatgatcatgaccagctacgacgccgaaatacccctcgcgcagcgcctcaaactcgtccgactcatccgggcaggaaatgccttcccccagatacccgccggcttgagtgcgatcctcgtccagcacataataggtatccgcatgcttgcggtagccctgcatggcgaaagccgcattggcggccaccggtttgagtacctggtaatactccggcagcggcatgtgctggaacaccattgatttggctccgatatgttcgggcaaagccttgaggaaggccaatgtctcgggcgaaggcgtgccgaaaccgcctccatgcgcatagtcaccggaattcaccagtaccagtcccagtacgttgcgcgtgcaatccacatccatcaccggcaatgcaaaagtgccgggaatggtggacgcggaaatcggcgcatcggtttcttcaccattggttgccgcaggcgagccgtccttatgacacatatatacggtctgcttggccagcgcatcgctcggcggattgatgcaaccgggaaactcgcggtagattccgtcgagttcggcattgctcaaaccgcactggaaatcgtggttgccgtaggtcaccgcccacggtatgccccgtgacgccaaaggagaggtaaattgaccgatggctttgcgcaccaattcacgcgtatggttcaacgcagattcaggaatcgcctcttcgcaccaacggcgtttgcggaagctcttggcaaaggccggatcgtagccggcgatctggttgccggagaaaatcaccagatcaggccgtgtggcatcaaggctggcctcaatcagggcgatggtgtctttggagactttcggcccatcctgaatgtcggcaatctgcagcacgcggaacttgccggaatagtggaattgcagtcgtccgagacgcgcagagatagagaccgggcggccgtcttcggcatcggccggcttgatacggggtttcgacgacatcccctctggcgtacgctgtgtttccgtcatgccctccactgtacacacaaacgaaaaggcccgccggagcgggccttttctacaagttcaactactggagcagaatctctgcacaacatcatcgtcgtaacggtaagtctttccaatgcccgtccaacgtaacagtcctcgtgaccatacactatttgtgggctctgctctgttcagttgttcttgtacctcataatctattcatcactcccgtttctcgcaacctgcagagagtcgttgtgcgttttttatcacaactgttcaatcgcactttctggctatcggaaaacgagctgaaccgttcacatcgaacccgtctgatgttcggtttcgttcgtttcaccgccgctcacggcgtgtcgcgagcacgctagcacactcagaaccaaccaacaccgaactaacatgaacacccgttgaattctggcgcgttcagccgttttccggccacgccagagcttacgatataagctatggcacagatatttgacgcaccctcgaaggcaattctgcgcagccaaatcgcagagcatattgccgaaaacgacaacaacgaccgccgcgtcgatcaggaaggcgaggcaccgctgcccaaggaccgtttcttcgaccgcgagctcagctggctcaagttcaaccagcgcgtgctcgaatgtgcggagaacgaagacatgcccctgctcgagcgcgccaacttcgccgcgatcttcgcctcgaaccttgacgagttcttcatggtccgcgtcgccggcctgaagcgccgtatcgactcgggcatcgccgtgccgtctgccgccggcctgagcccgcgtcagcagctgcgcgcgatcagcgagaccgcacaccgtctgcaagacgagcacgcacattacgcgatcgacaccattctgccggaattggagaaggagcgcatcgtcctgctgacgtgggacaagctcacctcctccgagcaggagcgtctctcgcgctactaccgccagcaggtgttcccggtcctgacgccgctcgccgtggatccggcccacccgttcccctacatttccggcggttccatcaacctggccgtgattgtggagaacccggcctccggcaagtcgcacttcgcccgtgtcaagatcccgggcaacctgccgcgcttggtgccggtggacgacatgaccgacgaggagtccaaggacgagcgttacggcttcatcgccatggaaaagctcatcgccgcgcatctggaatccctgttcccgggcatgatcatcaaggaagcccgctccttccgcgtgactcgtaacgaggacatcgacgtggaagaggatgacgccgagaacctgctcaacgccatggagaaggagctgctgcgccgccgcttcggaccgccgatccgtctggagatcacggacaccactagcccgttcctctcccagctgctcgccgaccagctcggcgtgagccaggacgaggtataccgtctgcccagcccgctggacctgaccgtgctctttgagctcggcagcgtggaccgcccggacctgaagaaccgtccgttcgtgccgaccacgaaccgtcagatcgccgaggtcgagtcctcccgcgcacaggatattttcgctgccatccgcgagcgcgacatcctgctgcatcacccctatgactccttctccacttccgtgcaggccttccttgcgcaggccgccgcggacccgaaggtgctggccatcaagcagaccctgtaccgcaccagctccaactcgccgatcatcgacgccctgatcgacgccgctcatgccggcaagcaggtgctggctttggtggaaatcaaggctcgtttcgacgaggacgccaacatcgcgtgggcccgcaagctcgaacgcgccggcgtgcacgtggtgtacggcatcgtgggcttgaagacccactgcaagctcatcgaggtcgtgcgtcaggaagcggacggtctacgccgctactgccacgtaggcaccggtaactacaacccgaagaccgcgcgactgtacaccgatctgggtctgctgacctgcgacccggtggtcggccaggatctgactcgtctgttcaaccagctctccggttacgcgccaaagtccagcttccaccgtctgctggtggccccgcgcaccgtgcgcaccggtctaatccagcgcatccgccgcgaggaggacgccgcccgcgctggcaaggaggcctggatcaagatcaaggtcaactccatcgtggacgagaagaccatcgacgccttgtaccgtgcctctcaggccggcgtgaagatcgacatcgtcgaacgcggcatctgcgctctgaagcccggcgttcccggcctgtccgagaacatccgcgtgcgttcgattctcggccgcttcctggagcactcccgcatctacgccttctgcaacgcggacggcccgcagatcggcgagggtccggcttccggcccggaggtctacatcggttcggctgacctcatgcaccgtaaccttgaccgccgtgtggaggctctggtgcgtgtcaccgccccggagcaggtcgacgggctcatcaagtacgtggacctgcagatggccgactccaccatgagctggcacatgcagcccgacggcacgtatgtgctgcacaccaaggacgacgagggccgcccgctggtcgacagtcaggaatatctgattcgcaagcaccagcgccgccccaattcgcacaactgatttcattcgatgctccctgtcagcacgagctgactgagggtggttacgatgcccggctcctctttcgagaggatgccgggcatcgttgttcagcgcgcaaaaactacgtagcagcggtccaacgtgacctacaatacaagagatgggtacgaacagtatgagacgaatcgtggaagccgccggcggtattctgtaccggtggaaggatgatgccgagccgacgcaggcatcgtctccatc

SEQ ID NO: 3032 - DNA, 4346 bp, Unknown
  R19_24m  MAG No. k141_18960
caccaccgcgccgcccaccgcagcgatcagcgtgatacgaaccttctgcaatcctcggaaaatgccgttcgccgcatataccatcagcatgcctggcgcacccagcacgattgcgcgcgtataggtcacggcttgttccaatacttcgccctgaccgcccagtgcccggcataatggctcggcagccgcgaacaatcccaatcccagtacggtgccgatgctcaaggccagccacaggccgtcaatgcctgcctgcagtccctcgcgacgacgacccgctcccagcagatgcgccacctgcgcagtggtcgagtaggccaggaatatgcatagtccgactgccgtgaggatgatggtggagccgattgacaggccggccaaagcggcatcgccaatgtgaccgacgatggcggtgtcaataaggataaaagtcggttctgcgatgagctgcccaaaagtcggtagcgccaacgcaatgatttggcgatgaatgctggtggagttgctatgcacgctcacacgcatatcatgcttagctacgttgcgcaagcacctagtgcagccgtacaaagttatcctcagcttgtccaccaagttatccccaatatgtggataaatgagtggattatccccagacttatccccaaaatgtggataactattttttctatccacatttgacgcttcagcgtgtcgccgcgctgaccgcaaggtgaaccaacgatgaaattggtgcgcgatgattcggcacgacttgcactttcacgcgttcattaggtcgattgtgcattcattaggtcggtggactttgagagatattgatcgagcgcctcagaatgccgccattccaagcgcatggtttgtggtgttaccaagcacagtgacctaatgagtgaggaatcgacctaatgaacgtagtcgtgcgatatcttccgctcgccacgccacctcctatacttgagggctatggcagaaggaagtgaacactcgtatcagaatgggttcggcagtggctcggatcgtggcgatcgtggcgaccgcgcgggccggggcggcgcgcaggcggcggcagctggcgacccgattttcgaccgcgtgcccccgcatgatgacgacgcggaaatggccgtgctcggcggcatgctgatgagtaaggatgccatcggcgaagtttcgcagaccattgacgtcaccgatttctaccagcccaagcatcagacgatctataacgcgatcatcgatctgttttccgccagtcagccggtggacgtggtgctcgtggccaaccagctgttggcggatggcaacctcgacaaggtcggcggcgcggactatctgcacagcctcgtcgcatccgtaccgaccgccgccaatgccatgtactacgcggagatcgtccatcagcgggccattttgcgcaatgtgatcgccgccggcaccaaaatcgcccagctcggttattccgccgagggatcgcaggctgaggatgtggttaacctcgcccagtccgagatctacgagatgtcgatgggcaaggtgcgtcaggactatgccgccatcggcccggtggtccacgacgcgctcgaccagctggacaaactgcagcagggtctcgtcaacaagggcgtgccgaccggattccgcgacatcgacgacgtgacccagggcctgcagcccggacagatggtcgtcgtcgcaggacgtccggccatgggtaagtccacgctcggcatcgacttcgcccgcgccgccgcgttgcaccacaacatgacttccgtggtcttcagcttggagatgagcaaggtggagctcgctcagcgtattatctccgccgaaaccaatattccgatggccgccctgcgccgcgccgacgacatcacccccgaacgctggaacaccctgaaccagttctggaccaagatgcagaatgcgccactgttcattgacgacagcccgaacatgagcctcatggagatccgtgcgaaatgccgtcgtctgaagcagaccaacgatctgaaactcgtagtcatcgactacctgcagctgatgacctcgggcaaggccgtggaatcccgtcagcaagaggtgtccgaattctcccgtgccctgaagctcttggccaaggaactcgaagtgccggtcgtggccctttcccagctgaaccgtggcccggaaatgcgtaacgacaagaagccgcagctctccgacctgcgtgaatccggctcaatcgaacaggacgccgacgtggtgttcctggtccaccgccctgacttctacgacaaggaagaccgccccggcgaggccgatatcatcatggccaagcaccgtaacggcccgaccgaaaccttccacctcgccttcctcggtgccacgtccaaattcaaggacatgccgcaggactacaacagcaatcagggggtgtgatgatgacaagcaacgtttcacgcgatgtttcgcaagaccaatcgtccgtggtgcagacccgcaaaccgtggtatgcgttcgccaccgtggccgcaggccgcttcgtgcggtttgcatcccgcgtcaccaaacatggcggttcggctttgcccggcaaagtcgtagaaaagattgaccccggcttcctgacccgtacgctcgggcagttgccgcttggcgtggtattggtgtccggcacgaacggcaagaccaccaccacccgcatggtcgcctcgatgctctccgatctgggattgaaggtgttcaccaatccgaccggctcgaacttcgtgcgcggcgtggtctccgcactgctcaccgaagtcactttcggcggcaaattggacgcggacatcgccgtactcgagctcgatgaggcgtacgccgtccacttcgtcaagcaggtcaagccccgttatgcgttgctgctgaacgtgatgcgcgatcagcttgaccgattcggtgaaatcgacaccacggccaaactgctcagccatgtggctgcggcgactaccggcactgtggtactgaaccgcgaggacccgcgtatcgccgcgctcgccgcgaaggccccggctgacaccacagtgcgatacttcggcctcgccgacgatttgcgccactatttcccgtccgatgacgacatggccacgaccgtgtcggtggaaggtatggccgggccgctcccttcagtcagtactcccctcagtccgcttcgcggacagctcccctcggagaggggagcttccgcaggcacggcagaactccccgccgacgtgacacttaccgccgtgggcgaccacaaggccaccttccagatggacagccaggactacgccaccgacgtcaaacttgaaggcgtctacaacctgtacaacgcggccgccgcgctcgccgtggtacgtgcggtgatgcaagacaatgccgccgcatccaaggccaccgccgcagccaacgcctgcgccgtgtccgccgacgagctcatcgccgccgtttcccgcgtcacgccggctttcggccgtggcgaggtcatcgacgtcaacggttccccggtcgaactgctgctggtcaagaacccgatgggcttccgcctctcgctcgccagcttcgacccggccaacgcggacaccatgatcgccatcaacgacgaatatgccgacggccgcgacatgagctggctatgggacgtggacttcacctctttgcgcgcgtccggtgtcgccatggtctccggcgtgcgcgcctgggacatggcattgcgcttggggtatgaccaagtgccagtcgccgatacgaacaccgacctcgaacaggcggtcatcgcattcgtcaacgccaatcccggcacacgcaagcacatctactgcacctacaccgccatgctcaaaacccgcgccgtactgggccgcatcaccgaagtacgggacgctggcgtgggcaagtaaccaccctctagcgcccgcgcgccacctcccgcctgcgggaggacatggtgaggaataagacttccccttagcgggaagacatcgacaaggagaacgcgacatggccagaacaattgatgtggtgtccctgtatcccaaagacatgaacatctacggcgattccggcaacgtgctgactatccgccgccgtctggaactgtacggttacgaaccggtcgttcaccagtacaatcaaggcgacgattggcccgaccaggtggaccttattctgggaggcggcggccaagacaccggccagaagaaaatcatcgacgacttctaccatcgcgccgacctgctgcgttcgcttgccgcagacggtacaccgatgctgatgatctgcggcctgtaccagctgttcggcgagtactttgaaaccgtggacggcacccgtctgga

SEQ ID NO: 3033 - DNA, 5705 bp, Unknown
  R19_24m  MAG No. k141_19198
tgcgcacgattggcccggtgccgtggcgccacaggaatatatgcccgaagagctgcgtggcaccgagtactaccatcccaacgatcgcggctatgaacacgaagtcagccagcgtcttgccaagattcgcccgatactgcacggtgacgaatccgggcgggaggcgtcgcgggccgcggactgacggtcttaggcgcgccggcgtgaggcgcgaatgcggaacgcggtggccagacagcaccagccaatcaggcagataaccgtcatcgtggcaaacgtccatgtgccgccgacggcagtggcgtgagcaaactcagcggtgccttcttctcctgcgccggcctgagccacggaaagaatcgtggagaacagtgcggtaccggcagcgccgccaaactgaagacacgtgttgaaaatggcgttgccgtccggcttgaactcgggagagacctccgacaggccactggtcatcacattcgcattgccgatggaatagaacagaccgaaaatgaaatagaatccggcgagcagcacgggcgtaagctgcatcgagaacaccagcataagcactgggcccaaaatagcgatgccgatcggaatcagaatcggcttgaccgcgccgaacttatcgtagaaccagccgccaagcggggcacagacagcgccgaccagtgctccgggcagcaccagagagccggccacaaatgccgtggtgccgagcgagagctgtgccacattggtgatgacatagccgtagccgatggcgaccaatggcagcagcagatatgcgcaggcgtgtaacagtacggcgggatccttgagaatgccaaggcgcagcagcggggagaaggcacgcttggaactcatggcgaacacgatcaacaaggcgaggcccacaatcagactgacaatggcgataatgccggagcgtgtggctgacttgccggacaccgccgcactgatggccacgccaccttggttgagcgccagcaccagaccgaccaacgcgacaacaatggacccaagctgaatcgggtcaagataggcagcctcggtcggtgtcttctgctcaatgcacttcatgccgatgcatgctgcgattagcaccagcggaatggcgatgacgaaaatcgcgcgccacggcagcactgtggtcaccgcgccgccgacggtcgggccgatggccggagccacggtaatgaccagcgatcctacgcccatcaatcggccgatcttcgaacgaggagactgctccagaatgatgttgatcatcaacggcgtggccacgcctgagccaatgccctgaataatgcgggcgacaatcagcagcgggaaggcttgggcgacgatcatgatcagcgagccaacgatggccagaatcacagccgcaagaaaaatggttttcagtgcgaatcggcgcttcaaaaacgagctgatgggcatggtagcggccaccgccaacagataaatcgtggtaatccattgcacagtggccgtgtcgacatggaattcgcgcatcagtgcggggaaaagcacggtcatcacggtttcggtcagaatgccaatgaaggcaagtgagccgacagccacaatcgcgccgataagacgtgtgggaatcttctcgttatcaatatgctgctcaggcatacatgctcctaaacgttcggttgcaatgtatggaatgtaaggtttaccaaccggcgtaggtacctgtgcgtgcggataaaccggcaatcgtactgccttggctgcacgctatggaatcacaaaaccacctgtgagtgtacggttcggggcggacgctacggtcgatgcgcaatgggctgtcccttggtttggtggggtttgatggggcgggttcggcattggtccggcggggcgggttcggcattggttcagcatgaggaaacacgcgataatatccgccctgccgcctagtttggtgaaccatgggtattgagaacacgcataagctgattgtcaactgcctgccactcaacgaaggagaacggcgcgctttcgccaaggcggcccgcgatgtgccgcaggaattcgtgggcgacgaagcgcaccgcggcgacatggtctggtcggccgctgttcccgaggagcttcgctcccaagctaccgcagtcatcggcaacttcccggtctcgcaggccgctcaatacacccgtcttgaatggttgcagaccttcagcgccggtgtggatgcgtacatccgctcgggtgtgctgcctcgcggcaccatggtcaccaatgcgagcggcgcgtatggccaaagcgtgtcggaacacatgttcgccaccatgtgggcattgatgaagaacctcaaccggtatgcctccaatcagcgtgatcatcagtggcaggatgaaggcccggtattgagcccggaaggtggcatcgcgctgattatcggcgtcggcgacatcgggtcgcatttcgctcagcttgcccaatccgtaggtatgcgtaccttcggcgtgcgccgtcatgcggacgtgccggccaagggcattgaaaagatgtatggcttcgagcggctggaagcactgctgccattggcggacgtggtggcgatggcggtgccgcgctcgccgcagacccatcatctgctgaatgcggatcgtctgggtcgtctgaaatccacagccatcgtgatcaatgccgggcgtggcgacgccatcgatcccgaggccttggccgacgccttgcacaatggacggctccacggtgccggattggacgtcactgagcctgagccgttgccggcggaaagtccgttgtgggatgagccgcattgcctgatcaccccgcatgtggccggcggcaatcatttggaaaagacttccgaacacatcatccgcatcgccctgaccaacgtttcccgctatgccaaacagcaggaactgttgaatctcgtgcgatactgattcgcctgtatcgggtgtacatgaactcatgtacacggccggcgtgtcgcatcccgctacgactgcggcatcgagatgatacctgcagaggcgtggttgatcagaggcccaatgaacgtggcccgaggtcagtctcagtctgatagttcgtagccgttggcgtctttatgccacggcgagccgggcttgctgcacagaatgatgatgccttcaacaaagccccagatggcggctgcgattgggccaagtccgagcagaatccagccgacaagcgtcagcagcagctgggccacggccttgccggtgttgccgagatagaagttgtgcacaccaagtccgccgaggaagatgcccaacaggccggcagccaacttggacttggatgattgccacaccggggcggcggcatacggagcggcggtgtattgcggctgtgcgtaggcattcggctgctggtaggcctgtccatagccgggctgctggccgtagcccgctgcgggctgtgcgggctggccatactgcggctggccatactgcggctggccatactgcggctgagcgtactgagactgagcgtatgcgccggcgggctggccgtattgcggctgctgctggccgtagcttccggcggcgggttgagcgtatgcggtgggctgtggggcgccatagccctgcggctgccgtgcggcatcttggccgtacgacggctgtgccggctgtgcaggttgtgccggctgcggaacactgtccgaaccgtacggttgttgttgattatcagtcatgtgggtctatcccttctcaatcgggaacggcagtaccttcttaccgtttctgcacaacatcatctcacgttttgcctaatagtaaaacctgccgcgctacgattgggccatgaaaagtttcctgaccagctggttgattatgactatcgccgccgccgtcatggtcgcggtgactcccggcatgaccccggtgggggagcctccgattctcggcatcgccgcgttcgctttattcatggcgctgattaatgcgtcaatcaagccgattgtgcatctgatcgcactgccgtttgcgattctgtctctcgggctggtcaccttgattatcaattggctgttcatgcgactcgccagctggctggcggtcagtctgttcggcgtgggcgtcttcgtacacggtttctggtggtcggtactggggtccttggttctgaccattgttgcgggaatcgtcgggtccatcttggatcagtgacggtgctcgctgggcgaatatgaataatggcggttggaatcggactgattccaaccgccattactcatatcaagctacgggatcgagcagagcgaacgctactcgcgcaccaagcggatatgctccacatcgtcgcgccgggagcgacggaacagcacgaaacgattgccgatggactgcaccacttcggcgttcagctgctcggcaagctcggcggcggcttccttggcggtcaggccagaaccgtcctgcacggcgcacttgatgagctcgtgcttctcaatggtttcatcggcctgattgacggccgactcggtcaaatcgttcttgcccacatagaacaggggcttcagcgagtttgccatcgcgcgcagctgcttgatttgcttcttggtcaatgccatgggaatttccttacatctttcgtataaccacaccagcatagcaaccggtgctgtctgtgctgtttgccgccctacagcgcgatgatggcggcgatgtaggcgatgacggcgacggcgaacacgagatcttgcgcggcgatggtcagggcacgccagtgggtgcggcggatgctctcctcgtagcagcgggcgtcaagtgcgaggctcaggttgtccgcgtgacgcaacgtgccggcgaaaatcggcacgataatcgcgctcatcgccttgatgcgctgggccagcgaaccggtttcgatggaaccgccacgcgcggattgggcatcgacgatggcacgggtctcgtcggtcagcgttggaatgaatcgcaatgccagactcatgaccagcgcgatttcttgggcatgaataccgagccggttgagcgggctgatcagggtggcgaaggcgtcggtcatggcggtcggcgtggtggtggtgaggaacaccgcgcccaagatgatcaccaacgcgaaacggcaggcgtacagcacggctatggtcacgccctgatcggtgatgctcagcgggcccagcgccaccaccggcgtgccggtgcgtaccacaaacagattgaccacgcccatcagccccagcaggatcagaatcggatgaatggattcgagcacccgtaacgggttcaggcgtgccgccgcgataacggccagggtgatggcgatgcccagcgcaagctggaggggcgtgttcaccgcgaacatcgtgaacatggcggccaggaaacccaccatcttcacgcgcgggtcaagtcggtggatcaccgagtgcgcgggtttgtcaggggagacggactcggcggggaaggcagtctcggttgccgagatgctctcagcaccagccgcgccggcaatcggcatacgtaccacgcgatcggcgatatgcttggcctccgctcggtcatgggtgatgatgagcacggtcacgccgcgcgatttgagcgtgcgcaacagctcatggatgcgctccttggcctggacgtccaggctcgcggtcggctcgtccatgatgagcacgtcaggattgcaggccagcacgccggcgatggccacca

SEQ ID NO: 3034 - DNA, 15293 bp, Unknown
  R19_24m  MAG No. k141_19300
agcccatcgccgaggcgatcaggcgtgcggtaggcggaccgagccggcgaatcgacaacgcgaccagcacacgccacaggtcggcgtgacgggccttgtccatttcgtcgaacatcttgcgcgtgttttcgccgggccgaacgatcaccggtacatccgtgacgccagtgcgcgtggtcttgtgatccacgcgcacgatgaccgcgtcggccggcacgtcatactcgggataggaggctgcggcaaagcccggcatggtaccaagtggagcctcagccccggtaggtgcgccggtcgtctcgctggcggcacctccctgtgttccggcggattcgactgcggcctcttcttgcgcgcgttcggccaactgcttggccgtgagctttttggccggcgtgggcgcggtccagaaggcaggcacctgatgccacaggccagagccgccgacacgcttacgcacctttttcttcttaccgttcgcatcgaccgtctcatgcacttcgacgattgcggcctcacgccacacacgcacgtcgcgcagatcggcggaggtcaggtcgaacaacccggattcgttggacaacaccggcttctgcgcggccggcaattccagcccctccaccggctcgtacggttcgggctcttcgccgggggcgaccagaacctcggtgatgttcggcgcgtaggtcgccaccgaatcaggccggttctcctccgggttggtcagagcgatggccgactgttcacccagatgctcgatgtcgaacgccttgcgtgaggccagtgaaatcacgcgctcggtcaactgggccgggcagctttccacattcgggcagcggatgtccttgtcaccctccttggcgggtgccagtttcgcgccgcatgaagggcagaactcgggcatgacgaattcgcgcagctggccctcacgccctttgcgccgttcaagcaccgggccgaccagttcgggaatcacatcgccggccttgcgcaccaccacggtgtcgccgatcaggatgcccttgcgtttgacttcaaatccgttgtgcagcgtggtacgagccacggtggagccggccacgtagacaggtttgagcacggcgaccggcgtcacacggccggtacgccccacctgcacggtgatgttgagcagttcggtgttgacctcttcgggcgggtatttgtaggcgatggcccagcgcggcgcgcgcgaggtggcaccgagggcgcgctgcaggcccaggtcatcgaccttgacgacaatgccgtcgagcgcgtgctcgatgtcgccgcgatgctcgccgtagtactcgatcatgtccagaatctcctggaatgaggtcaccgcacgattatgcggggagaccggcacgccccacctggtgtatagatcgtaggcctgcgactggtcggcgaccacatcatgggtgccgcgcggatggtccggcccccaggtgagctgccccagaccatgcgcatagaaactcaggcgacgggtggcggtgatgcgagggtctttttgacgcagcgagccggcggcggcgttgcgcgggttggcaaagggcgctcgtccggcgtcctcctgctcgttgttcagggtgtggaagtcatcccagcgcatgaacacttcgcctcggatttccacgaagtccggaacgtcttccttggggccgccgaggttggcgggaatggagccgatggttcgcacattcagggtgatgtcttcgccggtaacgccgtcgccgcgcgtcaggccctgttcaagcacgccgttgcgatagatgaggttcagggcgaggccgtcgattttgacctcgcagctcatgggcaggggcttggaatcaggccaatcgaggtcgcgaatcaccgagtcgtaccaatccttgagttcttcgatggagaagacgtcgtcaaggctcatcatgcggctggggtggcgcacggaggcgaagtcgttggagaaggagccgccgacgcgatgggtgggcgactgcggattgtccaatgaggggaacgccgcttcgagtcgttcgaggcaacgcatgcgcgcgtcgtaggcggcgtcggagctgacgggtgagtcgtcgatgtagtaggcgatctgatcggattccacccatgcggccacgcgagcccacaggcgggcggcggcctcagcggtcatcgtgttcacgtcgaaacggtcgaggcgtatcgcgtcgtcgtcagtgggctgcagtgcggctatccattgttcggagccaggggcaaaacgtgcaataccggtatcaggccggacctcggccacatccccatcgtcgaaatcccatgccagttgttcgttcgtgctcatggttgtctatcctagcgggctcggctcccctcggccggctataccgtcaactcccctcaggcggctacgcggatagcgagcgcaggaactgggcttggatgatgtcgatgttgtcgccttcaccgtcattcatgcgggccacggccaccgagagcgtgcgggccggcacgaacatgccctcatccacgcacacgcgggcggcgtcacgcacgatgtcggccacttcgatatgcggccagaccggcagatcatgcgtggcaagcacatgggcggccacctccaccgattcaggcaccggtatgcactgcgagtccgcacgggaaaccagttcctgcagttcgctctccagcgaaccaatggccccgggagcgatgtgatcgctcatgatgtaggctgcggcggctgtgtcgaaccggtcaagcatccattcggcgtacgcgaaccggtagtaggcgaacgcggcatcgtcgcggtccaaggccacacgcagagcattcaggcaggcggcgcgtgccgaatcccaatcctcattgcgggccagttggatggcgagcttcagatgtgagagtgggtaggcgggcgcgtacgccaccatacggttgaggtgcgggatggccgcctcggcacccttgatctggctcaacacgtcagccagctccatgtgtgcgtagaacagattgtccgggatgagcaccgtacgctcgtccaatgtggcgaacagccggttgtagaccacgcgctcggcataggagttgaagtatcgaggtacgccatggcctgccgcatacacctgatccaaatgggccacagccgcttcgaccgcttcgatggcctgatcggcttggcccgagaacagcatgtctcgggcgcgcagacgctccttgtcaagatcgtcggcaagcgtgaacgtgaagtccggggtgtccttgccatcgatcaacgcactggtgacctgagaggccaaaccggtcagttcgggatcgcatatcgattcgatgatctgcatggctcgctgggccttttccacggagccgagcgacgtgttcctggcgatatcatggaattcgttgacgccatgctgcagtaagtccactcgctggatagccagtccggcactattctgtgcgcccagcacgtgagcggtcgccgggctgaattgacggtcggccagttcgggctcctcctgggatccggtgggagagaaccggctgtccgccaagtcgaagtcggcgctgatgggtttcaggccgccttcgccgtccacgtccatcacggcaccgaacatgcggtaggtttcctcgggattgtcaagcccatcggtgtccagtcgcttgaggaaggcatcacgggtgaaggtgacggtgaccatattgcgcacggtgggattgcggcgcagcacgctcatcggatcatcgtccatgccggcggccccatcagcatcgtcagtgccgacgccctcgccgccgataccgcccaggtcgtcgcctgcgccggtatcgtccggcatgccgaacgccatttcgtcgatatcgacgcccttcatcaggtcttcgaactgcgaatcgatggacgcggcgccatcggcgtcagcggattcggccgcggcctgatccgtagcatccgcagacggtccggtaccgttgcctgttcccccggccgtgccgcgttcgtcaccggacgtcgcctgcccgaacgtctcctcatgggtgatggggcgggtcgggtcgccatggaaatcaccatctttggggtcggctttggaacccacacgccccaaatcgccactgcgcagatgttcgaaggcgcttagggcctcgctcatcatcgcctcgatggcggaatcctgttcggcaatcgcctcttcaagaccaatggaatcgatgtgcaacgacacctggcgcacggattcgctggtgccgaaactcagcgctgccatcatcaggccgatacgcaggttgtaggcggcgctcatcgacgcgcgttcggcgctgctcagcgcacgccacgtacggcgagtggtgtcataccggctatcgggcatcatcgaggtgccggcagtggtgaagccaatggccacttcacccgaatccaagcgcgaccggaactccacatcaaaccgatacggcaaccgtaaccggcgcaacagtgaggagagggtctgacgatacacccattcgtcgctcctcgccggcgaatacgaaggccgagcggcttgagtgttggtgtcgctcttattggtccgctctacagcgccctcaacactctcagtactttcagcgcccgcagcattcgtcacacccgaatccggcacgttctgctgggtcagcacatctcgaggatcagggaattcactgcgaatctgcccagccgtgcgtgcggcgatatcgaccaggctcagcacggcccgacgctcctgctcgccatcatacgggtcaagcgccataatcgcagggttctcaatgagtttcatgtcgatttgcgcggcctcggcacgggtcaccgtatcttccgtagggttgcgccccaaggaagcgttgcgctccagccaagcgctcaccgcagcgaatcggttgaggttgccttcgatcttcaaggatttcagcgcctgcccgaatgccaaggacttatcccacgtaaagaaatagccgctcgaatacgtcgaggtgtacaggtgcaacggttcggcgccatgcaccgcttccagtcccggcgtggtgtcgagggcgccggcttcgcgcatcagatcggcgaagtgatcctccagaccggaggcccgcatgccgtgggctcgtgccgccaaagtgtcacgcaccgaacggcgaatcgcaccgattggcgcctcacggttgagacggcggaagatattgccggaaccgaatccgatgagcagaccattgatctgcggcaacatatacgtggcgaagaacgcgatggtaatggcatcgcggtattccaaatcatgacgcatcacaggcggcagattggcacgcatctgctcaagcgtgtaccggttgccggccttgagccatgaggcgagccacgtcatgcgtccggtgtcgtcacgccccaccacgccaccggtaatggccttcacgccgtcagcaccatgaccaaggccacgccccaaaccacgcccatgatgcagcgcacttcccaggccatggcctgcacgggagaaaccggaacgtgaacgcggctcgtcgctttcgcccagccgctcaccgtccggcagagtcacttccttttccttgccgaacatgaatcgcgcctgcatatcttgcacgtccatgttggggtcggtgcccacgaatacgcggccatgcgtatcggcgaacgccacctgcgcaaaatgatcgcggtcggggaaaatgccaagcgaaaagccacggcctctggtggagggcagctgcgcccatccaagcaccagcccttccggcacgttctccaattcggggaaggtgcgtcgcttgattacaggactcagcgccactgcatggcgagtcagttcgtcgataatgccgcctttacgctcactggtctcccgcaaggcatcgccgaacggattcgtatcgtgcttcttcggcttggacagtcccagatcggccgcgagcgcgttcatcgaatccttcagcccgcccagcagtggcgtgcggttgtgcttcccatggtccgatgtacgttttggcatgattcacattgtctcttgtttgcccgacatcaagcccgaataaagcctatagaataaatgcgtgcattccatagaccacactcgcgcagaccgtccgatgccgtcgaatcatgaacggcacctgcccagccgcccggatacccggcaccggctgcgtttggtgcgcctgctgatcgccttgctggccgccgtcgccgccatcgccgccatggagtgcatcgtgttcaacctgccgttctggcgtacgctcggagcgagcacggatacgaacgccgtgcataacacgctgggttcgggtctcacgcgccggaatgatggcatgttgaccgtcaccgatccgaccaaggcctatcttgaactgaccgcggacggcacgtcggattacctacgcatcgataccgagagcagcaaggtcatcgataaggcccgcgagcaggccgaggccgaatccaaagcgaacgacgataaggaagtcttcaaaccgctggcgaccattcatgtgcgcgcggatgtcgatggcatcaccggcaaggcccagtcgatgaatcccgacgctattcgcagccattatgtcaaggcgccgggtgccggcatcgtgcgtatttggattcaggaagagcgcggcgcgatcgtaccggtcaccgacgcccgcgccaacgtgcgcgtaccgttcgtcatcaattggatgcgcgtgctcgccatggccttggtgttgctgatgattgccgtctggaggccgggatcgcgcctgtggcgtatcacgcttgacccgtccagcactcggcaacgacttgctttcgtggggcttctggcgattcctaccctgcttatcggcgtatccatcatccacgaactgtggtacgcgtcttcgctcgtcttccacgtttccggcgattacacctatgattttgaccagtatgggcatgtggccgatgcgctggtcgccggccggccctggctcgacttgccggttcccgaacaactggccgccaccgagcacccctatgacgtagccacacgtgcccagctactcgccaatggagccagtccgctctactgggattacgcgtattatgacggtcactggtattcctattttggcgtgttgcccgcagtgctgctgttcgtcccctatcgtctgctggccggtcataatctgccgacatccgccgccgagtatattctcgtgctgctgttcatcatcttcttctccttgctggtgctgcgcgtcatccatcgtgtgatgccgaagacttcggtggcggccgcgtcgttagtagtggtctcatcgttggtgagcgcgcaagtggggtatttgctgtatcgcacgaacttctatcagataccgttcgccgcatcgctgacgttgacgtcgctgggactatggctatggctcggcgcggacacgtcccgccgtccgctgagaccatcggaccgatggcaggcgggcgatgccaagcctctctccctgccacgactggccttgggcgccttgtgcattgcggcgaatttcggatgccgaccgacgttcaccttggccgcattgcttgcgttccccctgttctggccgcagattcgcgcgctgggcaccggtctgcgcacacgccgcatcaagccgttgcaggcgttgcgcgcgccgctggcggtaatcattcccgccattctcgtcgtgacgcctctgatggcgtggaacatggttcggttcgattccccgttcaatttcggcaatgcgtatcagttctccatatccgatatgacccggtataccaccccgtccgcggatatgcccgccaacatctggtattacctgttcctgccgctgcgcttcatggatcgtttcccgtggctggcgggctctcccgccccgatgccgcaatggggttattacgaggtgatggtcggcgcgattttcacggccacgccactgaccttgatggctttggcgctgcccctgctgcgcagattggaaacacacggcatgcggccatggctgatgtcttgcttggccgtggcggcggtgctggtcgtattcgacagccgcgtcggcggtttgggatggcggtattccgccgatttcggctggctgatctcgctggcgtccataccggggctactgtggctggtcaatgggcgcgaaccgagccggtcattggcgggggccaacgacgccgcttcaggcgatggcatcgcccgcgtcactccgtggcgttggctgatgcgctgggtcgtggtgctggccgtattgtgggcgctgggcatagccatactgagctgcttcgtgcagtcgcgcagcgattcgatgatcgacaacaatccgacgctctggcatcaggttcaggcatggttcacgatgctctagtctcgtatcggcgtcggatcaggtcctcataaaacgccacagcctcagccggcgctccgtcaaacacgaccgcgtgctcgtccagcaccagtatgcggtcgatggcgtattcgggccggcggatcatatccgtgtcatgcgtggcgaaaatcacctgcttgttgtagctgaacaacgccttggccacatgcgcggtgccaatctcatccaatcccttgctcggctcatccgccacaatcgcactcggctcaaagctcagcgcggccgcaatagccagcaggtgccgtttctcggagtccaattcgccggccttggccttggagacctgcgccaaatcaaaatgcgcgaacagattaccgatgcgcgcatgacgttctgactcgggcaccttgtgctttttcaacgcttcggaaacagcctcggaaatattcgccgcttggtagaaactgttcggaatctcctcgcggcgaactttgccgaccagattatcgatgcgcttcgcgtccttcttcacagccgggtcaagacgttcctcaccgcccgcaatggtcaccgtgccggcgttggccttcaacgaaccgtccagcagacccagcaatgtggatttgcctgcgccgttcagtccgatcacggccacccgccgctcgctgatggtgatgtccgtgggagcaagtcccacgtgcccatcatcatacgtatgcccggcctgttccaaagtgaacgtcagcgatgccgggtgtggcagttctttcggtctaaacaagaatcccatgccgccattgtacgtggagtacaggtgtggtgccggcaaacaccggcctatcgcagcaaagcggcgacggtattgagcacggcgcggatgccacgctcgaattcgtccggttcgggcagcagggaaacggccaggtatccattggaggtcatgtcgaagaagtagccgggctgtccggtgagttggtgctcgtcaatcagccgcaacaccagttcgttctcatcgatgacggaaggcactcgtaacagcacgttccagccgccttcggcccgtagcacgctgaccagcccgttgggatcggcgtcaagcaactcgtgcaacttggccaggttattgcgcacgcgctcccccacccgtctggtctgtgcgggcgcggcgttcaataatgcgggaatccgttcggcgatgatgtcgcccatcggcagataatcgtcggcgatgacgtccagtcgacgctgggcctcggcaacgtcctcggcaggtccggacacctgaatccacccgactttggcgtgcggcgcggccagcattttggagaatccgtctagggcgaaggtgagcacgccgcgctcccccgcgagccgtgcgtcgccggggaaaggttcgagagagtaatcgaagaacacttcatcggcgataagggcgatgccgtgcccacggcacaatgtcacgatacgtgcacgctcggttggttttacgtacgaaccggtcggattgttcgggttgatgagtaccaatgctctgacgcgttcgccaccgggctcgctgagtagccgctcgagttcggcgatgtcgatgaaccaggagccgtcgaattgcaactggtattcgaccgtatcgacgcattcaagccgtgcaatcgactcaatcagcggatagccgggtttgggtgccagcaccgcgtcgccggcatcgcaaagtaacttaatcagccacgaatacgcctcggacgtggagctcagcaggtacagggcgtccgggtcggcgccctcgatggcggtattcacattggtgaaagcggcatggcgctcgttcctgccctcgccggcggcgggcgaagccaactgagggctgcttgcgtctaccacgtttgccgtattgaggaatgcggccaatgattctcgtgccgcacgcggtccacgcgggtcggccgtatacacgctcggcaccaattcgggtgccaacccgtggcgggtcggattggaatcgttgagtttgctgagtgcgatgccgtttgccttggctgccgcctcggccgccgcaatgggattcggcgcagaaatatccacacgagaagagaaatgcacgctcataccctccacgataaaaccacccctgccgagccaggtatatcgaggcctcatatccaccagcatccagcactacgacaatcgtgcggcacggcagcggagtcgtcagacatactatgacttcaatccacatcgaataacggcctagctacattcattaggtcattttcgcgctcattaggtcactgctagtcgagcctcacaattgttgatgcttgaaacgccgccattccgagcccattgcaattcaggtttggaatgggagtgacctaatgaacacataatcgacctaatgaacgaattactcattaaaaaaggccgcccgaaatacttggacggccttacatatggtcaatacggctcctgcgccagcagaaataactcagctcactgctgcttggtgctggcgtagtaggcggcaccgacgatgccagcctggttacgcagcttggcgggcacaatcggggtcttgatatccacgtacggcaggaacttttcgctctgacggctcacgccgccgccgacggtgaacaggtccgggttgaagtacttttccataaggccgtagtacttggtcagacgcttggcccacttcttgtagcccagttcctcgttctcgcgaatcgcggaggaggcatacttctcggcgtccagatgcttggcgctcaggatgatgtgtccgagttcggtgttcgggatgagcacgccgttgtagatcaaggcggtgccgatgccggtgcccagtgtggtggcgatgaccagaccatcctggcccttggcggcaccgaactggacttcggccaggccggcggcgtcggcgtcgttcaccacgacgaccgggcggccgcaggcttcggagaacacttcagtaacgtccacgccaatccaagactggtcgaggttggccatgaagtcgagcttctggccgggcttgatcggcgcggggaaggcgatgccaacgggtgcggattcaggcacttcgaagtggtcgagctgctgcttgacgattttggccacggcctgaggcgtggagacctcgggagtgagaatcttcaatcgcggctcggcgaaatcgcccttggtcagatcgacaggtgcggccttgatgccggaaccgccaatgtcaacaccgaaagcctgtgcagtttcaatcatcgttgaccttcctttccatacgttttcatcagttcgtagggttgcgcccagtctaacgcgaccatcacgcggacgcgccggacgggccggggcagggccgtcactcaagcgacggcatgggcttccaggtggggtcgtgcatcagcttgcgcgagtcccaccagcccttggcaatctgcaccaaaccggtcttgaggtgttcgcgatccaccatcaccaggcgaatgacttccttggccgcggtgagcacggtgcccagtccaaacaccagcggacggaagtcgccgtaggtcatgaagtaccgggccatatagccgcggttgcgcatgatgtggtaccggttcatgtcggacgtggagttgagctggcgcacgccggcgatatcccagttgccgatttcgcgcgtacggcgcaaaatcacgtcgggcaccacaatcgggttggtgaccttgctggcgcggtagccatacatcgtgtcatcccagtagatgaagaagcgcgggtccggcagaccgatttccgtgaccacacggcggttgaacaggccgccttcgaagcacagcgtgtccatcactcggtatccggccgggccgaatgcggcgggcgcgatcgggttcgggatgcccagcggcacaatgaagtcgtactgccagtagaacgggccgccatcgtaatcgaatcgggatccctgaatcacctcgtgcttgtcggtccacttggacagcttggcaatggcgtccggcagcacggccacatcgtcatccatcacccagaaccatgcggcgcccagatcatacgccttggccacgccggcggagaaaccgcccgcgccacccaggttctcggtctgcggcgcatagaccacgcgctcttcgttgccggactggtcggccacggtggtgccccactggccggtcaccttgccggcaaacgcagcgaccatgtccgccgtctgatcggactgctcattgtccacgatgacaatgcgccacggtgcctgctcaagcgccagaatcgaatcgaacagtacctcgagcagctgctgacgtttgtaggtggtgacgatcagggcaagcttgtcaatggtgttgttgggtttcttcacttcagccatggctcccattgttgcacttgaccggcacaagacgaatttctgcacagtgaaacgcgggttgcgtacgtccggcgcatggcgtatgaataagcctgtcagtttcagggaaggtgcaattccttactggcggtaacctgtaccccgggtttcataacggggatggcgggaagcccgcgacccgcgcaagcggctgatccggtgagattccggagccaacggtatagtccggatggaagaaacgagggctcattatgagcgtatcttcgcgtatccgcatgcaagttgttcgttctgtggcgcccgaggccgagggttcggccagcgcgtccaccgccagcaccagcgccaaactcggctcgcacaccactggtgtggccgattccggccgctggtccacgcgccgtatcgccatgtatgcactgttcgtggcgctggcgatggtcaccagcttcattgaattcccgattacgccggtcacttggctgaagtacgacccgtccggcatcgtctgcctgatcgccggctttgcgtacggtccggccgccgccgcaatcgtgtctgtgctcggctttttgccgcacatgttcgccgacccgtggggttcgctgatggctgtgctggtggcgctgttcctgtctgtgccggccgcgttcatctaccgtaagatccgtacgcgcaagggtgccgccatcggcattctggtgggtgcggtgctggccatcgtggtggcgctggtgggcaacctcatcatcacgccgatttacgcgcacatgacctaccaggctgtggccgcgatgattctgccgattctgctgccgttcaacgtggctaagatggcgattcacgccgtgatcaccttcctgatctacaagccggtctccaacctgctgtccaagcagcagtgaccggcctgagacgggcctatgcccgccacgactaacgaccactcaacgaccactcaaagaacaagaacgcagaactccggcccttgccgggattctgcgttttcgcctatcagttacggattgctgtttcatgaccgttgcaccccattccttcgacgccgacgagttccacgattccgccgagcccgctccccccgccgccgtactcaaggacattcgtttcagctatgaccgcggcacttcatgggctttggatggcgtttcgctcacggtccatgccggcgagcgcctatgcttggtcggtccgaatggatcgggcaagtccacgttggcccgtctgattgcgggattgaccgcgccggacgatggcgaagtgacgctactggaacagcgcgtgtacgcagccggcccgaatgccgacgcctatcgcgctgcccgccgcggcatcggtatggtgtttcagaatcccgaggatcagctggtcaccaccgtgttggaggatgacgtggcttttggcccggagaatctcgggctggagcgcgggctcatcggcgagcgcatcgttgattcattgcaggccgtggggttggcgaacttgcgtcagtccgacccgacccgtatgagcggcggacagcagcagcgcgccgccatcgccggcatgctggccatgaacccggcgatgctggtattggacgaaccgaccgccatgctggacgaatccgcacgcgccgaagttatgcgcattttggatgatttgcaggcgcgcggcaccactattgtgcatgtcacgcatcatccggatgagaccgttcatgccgatcgcatcgtgcacatggaggccgggcgaatcgttggtgtcactgcagccgccgataatcgacccccgctagcggaggctgtctcgcaaagcgagactgagggtggtatcggcacagaagccgcccccagtcgtcctacgaacgacagcccccgccagcggaagcgcgaagacggctccgaactgccgctgctctccgacggcatcggtgatacgacgaaccccattattcgcgtctcgcatctgacctatcgctatccttcggccaaacgggcggttatcgatgacctgtcgttcaccatcgcgcgcggtgaaaccgtggcactgatgggcgtgaacggttcgggcaagtcgacgctggtgcgcatgctgtgcgcgctggccgcgccgaccgccggcagcatcgaggtggccggcgttccggtggcctcgaccggcaaacgcggtcgcaacgcgcgtccgaagccggcgaatcgcaggcaattggcgcaattgcgccggcatgtgggttacgtgatgcagcatccggagcatcagctgttcgctgacacggtagccgaggatgtggcgtacggcccgcgcaaccaggggctcgccgaggccgaggtggccgaccgtgtgcgcgaatcactggacctgctgcatatcgggcatcttgccgaccgctcccctttcgacctgtccggcggacagcagcgattggtggccatcgccggcgtgctggcctgcaatcctgacgtgctcatcatggacgagccgaccgcgagcctggacgtccaggccaaggagcgcatccatgagctgttgcgcacgctcaaatcgcgcggcgtgaccgtgctca

SEQ ID NO: 3035 - DNA, 6748 bp, Unknown
  R19_24m  MAG No. k141_19371
ccatggctgatggatgcgcgtaccgaggccgtgaagctggaaaacaagcacttcgtctatcgttcgacgagcgccgacgcccagcattccctgaccgtggacctcaacatcgagcaatcccccactttcaccatccgcaactccgacggcagtacagcgtatcaatactgagctacctcatcagagggagctcaccattcaccgccgaatgcctcggatcagcaggtcgagcaggtaaccgtacgaccggtcgacccgttcgcggccacgtgtgcggggttgggcggaacgcagttcgaattggatgaacccgtgtatggacacccagatggaggatgcaatcaggtgagggtcatcgtcgcggaacacggccgccgcctggccgtatcgaatgatctgcgtgatggcttccaggcaatgctgggccgagtccgacgcctgccccatccagaccagcgcgtaaatgccgggggcatccagcgcgtgttcacggtagatcatgcccgccctgcgcaggcgcagcacggggtcggattcgtcaatggcgatgagctgttcgcgcagatcggtgaagtatgcgtcgatgagcgcatcggacaccgcctgcttgccgccgatgtgctggtagatgctggtgggcgacacgtcggcctgcgcggacagcgcacggatggtcagaccgtccacaccgtcccgttccacgatctgccttgccgcgtcaaggattctcccgtggatttcaagggtgggcgtgcgtttggatcggggctgcgattgcgtcatatccgttattctagggtgcatacaggccattaccgccgtttcggcatggccacgatcgcaacgaccgcggcgataagtgcaatcgtcatggccgccaggcaggcgatgtgcagcccgtccatgaacgcggatgcgaccgagccatccagcaatctgcgcggggtgcccggcagggagctggagatggattcggcagccatcacggattccttggatacgccaaggatgccctggggcaggtgggatccccgcagcgcgtccgtcaggccggtggtgtacgcaccggcctgcagcgaccccatgatgccgacgccgagcgttccaccgagttcgcggatcgtgtcgttgacggcactgcccataccctcctcgccgaccggcacggccgtcatcagtgtgtcggtggcgggaccctggacgagggcgatgcctgcggccatcactgccatgacgaccgcgaacggcagtgtggcaatcgccgtctcgagcgccgaatacccacgcagcgcctggaaccatggggttgtgaggaagatgaaaccgaacaggcacaggaaggcggcgcaaatggccaacatgccgatgacggcgcacacccaaaacacgctatcccatgcgaaccgttgcagcaggatgccgccgatgaccgggccgagcgctatgcccaccccggatgtgccgacccgcagtccgacggccagcccacgcataggcgatccgtcgaacaacccgatgatggatgacagcgtggctcccatcaagttgtatatcaatatatcatacttatggaacattgatacacatcatgtcgggaacaggcatccgcatcgaaaacaccgacctacaacacaatcaggcccgacgaccatcaaaggtcgtcgggcctgattcatacgcgctgtcggactaacggcgtccggacttcatacggaatggcgcattattgcgattcttcttggaatggcggcggttcgggccttccgtgttgccgtatttggcgatcatgcggcgttcgtgacgcttggcaccttctgaacgctcgtcgcgtacgatgcggttctcgttcttgtgatggatgcgcttgtcgaattttccgcccttgccgtaccgatcattgcgacggttcttgccgtactcgttgcggccatcgtcctggcgctcgtcgtaacggtttttgccgtatccgccgcgacggccgcccttacggcggtcatcgccatgctcgaacagatagtcgcggcgctcggcctcggggtcgctcatgccggcgcggcgttccgcacggttgcggttcttcttcacggccttcttgctggccttgtcgccgtgcttgcgctgcggctcgccttcggcaacaaactcgccgcctgcgttctcgtgctggaatccggtctcggcaacgttctgctcggcgcggtcgcgattgcgattgtgcttgcgcctgccgctgcggccggactcatcgcccgccgcgttcttggcgcccctgttcttgcccttgcgcgggttgcccacgggctgcgacttgtcgaggctccaaccatccacgcgctcggcgcggtcgcccacaagctcaagcacttcgggcgaatcgtgggtcacttcgatcatcttggttttgatgccggcctggttcagtaagcggcgcgtctcgcggcgctgctcgggcagcacgagggtgaccacgtcgcccgccttgccggcgcgggcggtacgaccggagcggtgtacaaaggacttcgggtcagccggcggctcgacctgcaccacaagctccacgccgccgacgtctatgccacgggcggccacgtcagtggccaccatgacgcgcacgtcgccggaatcgaatgcggcgaggttgcgatcacgctggttctggttcaggttgccgtgcagctcggcggccggaatgccgttctgcgtcaggttcttggcgagcttcttggcctggaacttggtgcgggtgaacaggatgcgacggccttcgcccgaggcgagcacgcgcacgagttcgtgcttgtcgccgcgcgtggtctcgaacacgtggtgggtcatcaggtcaggttcggtggtggccgaatcgacctcgtgcaccttgggatcatgcaggaaggtgttcaccacttcatccacgccgtgatcgagcgtggcggagaacagcatgtgctgggcgtcgggcgaaatctgctcaagcagtcgcttgaccggcggcaggaagcccatatcggccatttcatcggcctcatcgatgaccacgacttcgacggacgagagcgtgagcgcctgctggcgcagcaggtcctcaaggcggcccgggcaggcgaccacgatatcggcgccggccttcagatcgcggatctggtggatgtacttgacgccaccgtacaccgtggtggtgttcatgccaaacgtgtgggccagcggcatcagcacgtcgttgatctggttcgcgagctcgcgggtgggggccagcaccaggccgcgcgggtgcggcaggaaatcgtcagcgcggcgctcttccaagctggccttcttgcggcgcttgatttccttgcggaactcctccatcgcgatttcgccaagcgaatcataggagccaagccgggtgaccagcggaatggagaaggcgagggttttgccggagccggtgcgccctcggccgagaatgtcgcggccggccagtgaatcgggcagggtgtcggcctgaatggggaatgcggtcttcttgtcatctgccgcaagtacgcgcaccagcggtccgggtacgccaagttcgccaaaggtaagggggcgggattccgcgctgtcgttcatctggaaatcagcggaatcgtcacgatcatcgaaattattacggggcacagtggcctttcatgtcaaaggttacgcaaattacgcaagctttccgagcttagcgtaagccccctactttgcttgatgctcgccacgctgtcattccactctttacttatgaccccatggggcggtaactcgcccatgaggcggtaactcgcccatgaggcggtaactcgcccatgaggcggcaacttgcccatggggcggtttgaagaaattgtgaaaccgcagaataaagccattttcgtctaccgccccatgagggttttaccaccccatgggatgtttgccgccccatgggccaattaccgccccatgggttctaccaccacgtaaggcgagcaccgccccatggaacacgcaaatggcccctacccgtgaaggtagaagccattgtgcaaaagggctgagccacaatacggcccagtagccctaaaacacactacaaaatatccggatcgtctttggcgatagtgccggttgccttgccaatggccttcaggccgtggtaggccacaagaatcacgatcgtgccaatggcaatgccgttgaaggaaatgccaccaacagtgaacgcgaattggccgatggcaataatcatggtgatggctgccaccatgatgttcagcggcttgtcgaagttgaccttgttctcaacccagatgcggatgccgatcatgccgatcatgccgtacagcagcgtggtcacgccgccgagcacgccggcggggatcgtgttgatcacggcgccgaacttcgggcacaggctcaggatcagggcgaaggcggctgcgcaccagtaggcggcggtggagtacaccttggtggcagccatcacgccgatgttctcgccgtaggtggtggtgccggagccgccgccgaagccggcgagcgtggtgcccaggccgtcggccatgagggcggtgccgatctggttgtcgtagtcgcggccggtcatctgggccacggacttgacatggccgacgttctcagccacaagcacgagcacaacagggatgaacatgggaaggatggaaaaatcggcctgcggcaggtggaacttcgggaagccgatccatgcggcgtcaccgatggcggagaagtcgacctggccgcggatgcaggcatatacatagccgatgattacgccgaccaaaatgttgaggcgacccagcaagcccttgaacagcacggccacgagcagcacggccagcagggtaaccagtgcggtgtccggcgcggcttggaagttggtccacacggaaggtgccagattgaaaccgatgatggccacaatcgcgccgttgaccacgggcggcatgatgatgtcgatccatttggagccggcgtaatgcacgagcacgccaatcagggccagcagaataccggtgaccatgatgccgaagctggcgaccgcaatgcccttgttggcggtggtgaccgcggtgatcggtgcgatgaagccgaaggacgagcccaaatagctcggcagcacgttcctgttgataagcaggaacagtgcggtggacatagccgtgaagaacagggtggtggacgggtcgaagcccgtcagaatcggcactaggaaggtggcaccgaacatggcgatgacgtgctgtgcgccgataccggcggtgcgcacccaagtcagacgttcatcgggctcgacgacctcgccgggcgccagcgtcttgccgtcgccatgcaattgccattggaagatattggacattactactctcctcgctctcgcttggggcacggcattcacaaccagccgcactacgcgccattctagctcacgaagattttgtgaagtctctcttccgggaaaggctatttgccgtaatactccagcaggtgcggatcgacggcctgcaccacatccaccaaatcgccattggacaggtacgggcgcttgaattcgcgccacggctccaccttgacctcccagcggccggtcgtctcgtcgagcacgggccgggcggtctgctcccagcgcacacgcttggaggtgcggccggtttccgggtcgcggcgcgtgtagtgcaggcaggtgcagttggtgatcttccagtcgtccgagtcggcgcgatgcaggaattcctcgtcggccagatcctcgatggtgagcatcagggcgagcatgaagtcgccgtgggtgaccatgaccacggattccgaatcggatttgcggctcagcgaggtcaggatgttgtgcacacggtcctcggccacatcggcaatcgactcgcctgccggcggacgccagtacagcggatcggtattcttgaagttccagttgcgtgcgtagttgtttttgaattcgtccttggtgatggtgttgatttcaccccaagaacgttcgcgcagcacacggttctcctcccatttggccttgggcagggccatggtggccgcggtttcgcgggtgcgcacgtatggcgagaccatgtaacggtcgaacagctgctgctggctgacgagccagcgtccgatgcagtcggcctgcttgcgtccggtggcggtgagtctccaggagcggtcgggtacggtgacgttgtcctgcgtatacagggagttgtcgccctgttcgcccgcctggacgatgacgttcgcttcggattcgccatgccggattacgtatagatcgagcggcatgctcatatggattcctctttcgttattggttacgttgtgttgttttctgctgtttcctacttgacctgcgtaatggtgttccccttgaccatgaacgcatgccgggccatgtcgatcatcggctgatcgaacttggagtcggtgtagaactcgtcgatgacggcgtccggaccgtacagttcgcggaaccgtttggtcttgttggtgttgaagttgaggtacgtgaccttcatcgtctccacatccacctcgctggccacgagattcctcacgccgagtctgcggcaggcctcccccaccgccagaccgaaggatgcggtgaggatcacatcgtccgactcaggctggtaccaaggcttgatacgtgcgtaatatcggtcccagaaatcgtccacgagctgttcgacgctcgccacccgtttggatcggctcagttccgtgagatagc

SEQ ID NO: 3036 - DNA, 4889 bp, Unknown
  R19_24m  MAG No. k141_19414
cccgggggcccaacgccgttgagaaagaggaagaaaaaaggatatagaggcttagatgctgtcgattattcagcgttcttcacggccgtcgcaatggacacggccgggtccaagaacggaatcagcgtggactggaaggcgtggtacaggtcggacttgcccggccagaccgtgccgatcacgtggttgttcttgtcaagctgatggaaccaggaaccgccctcgtggtcgatgacatgctcatcgacatactgggcgaatgtggcgtaccagttggcgtacatctcctcgccggtggccgcatacagcgtggcggaagtgttcaacgattcggccagcgtccaatgcatgcgatcggtgaccacgggcttgccgttccagtcggtcgtgtaggcgagtcccacggtgccgtcggcgttccatgcgtcggccacggcacgcgcgaacagatgctcggcggcgtcgacgtacggctgtgcgccgtcaaggttggcgaaggagcttaacgcccactgcgtgatcaagcgggcccattcgatgccgtgacccggcgtggcgccgtacggcttgaactgatcatccttcttgtcgacgttgcattcgaggtccagcgaccaatcggacttgaaatgttcggggatgcgccactcgttgtgcttcgcccagccgatcacatggtcgatgatgcggccggcgcggacgcgataggtgttgttcccggtggcgtcggccacggccaagaacgcctcggtggtatgcatgttggcgttgagaccacggtacgggtcgagctcggtgaattcggtattccaggtatcgacggccaaaccgatttcgtcatcccagaaatgcttgtcatacgtggcaagcgcctcatcaagcagttccttggcacccggacgtccggccagcagggcggaggatgcggcgagtatcacgaaggcatgcgcatagcagaccttgcccggagcatgggtgccgtccgcgaacacctgcgggtaccagccgccgtgctcgtcgtcatgaagaatgccggtcaatcccttgagcgccgcgtcggccagctccccggcgcccggatatccgagcatgtcgccaatcgaatacacatgggccatacggctggtgatccacgtctcgacgccgtgggaggggtcgagggtgccgtcggcgttcagccagccggaaccgccatccggcgctgggaagcccttgccgaacttcagcagctcgtaggtttcggaagccatgaaaatgcggttggcttcggtgccgagcgtataccgtgggttattggtcataatgattgttcctttccttaacgagaacatgcggtgggtgcgcaatgagcatgcagcgggcacgtcttagtgcttcacacgaatgccgaaatagtccatgaccagttcgcagaacatcatattcgaccagctgaaccattcgcgcgtgtacttggtcggatcatccacgtcgacgccttcgtgcatgagatgtgtaccggcgtcggtggctacaagacggtcgaggatatgcgccttgaagtccttgctgtcactggtcatcgcctcgatagacagcgcgatcggccacacatagcgcggcggggtgtgcggtgagccgatgcccttgagatactcgccctcgtaatagtacgggttttcgtcgctgagcagcgtgcgtcgggtcgccagatacgtcggatcgtccggtgcgcagtaccccaagtaaggggccgccatcaaggagggcacattgctgtcgtccatgatattgacgtgacccaggccgtcggtctcgaacgcgtaaatcgtctcgccattgcggttcgtcgttttggcgtgggcttcgatgccttcggtgatggtgcggcgcagctcgccggcacgggcggcgatatcggcgtcatccagaatctcaccgccgaagatgcgttccagatagcccatcaccacggcggcgaacatgttcgagggcaccagatagtggtaggtgcaggcgtcgtcgctggggcggaagccggaccaggtcatgccggtgtacgccaccggcgaccccttgccgtcattgctcagcgattcggtggggatgtccgtgtcgcggatgaagaaatacggggagcgttcatgatgctgctcggtctcgaagacgtcaagaatcttcttgacgccggcaatgaattcggcatcgaagtgatcggcgttgccggtgttcgcatacagcatccaagccaactggatggggtagcacagcgaatccacctcgtacttgcgctcccaaagccaagggctggagaaatcggaccggtcgtccttgtcccaggaggcgccgttcggttcctcgttgaaggcattcgcatacgggtcgatgatgatgtagcggaactgttgccgtatcagaccggcgatcaggttcgcaatatcgctgtcttcggcggcaagggccagatacgggcgcaattgcgcggtcgaatcacgcagccacatggccgggatatcgccggtaagcaggaatgtggtgccgtcgtcatgccgtttgaccgtggtggtcagggtgtcggcaaagcaggcattgaagttctcggcccaggcggcgtgttcggtgccgcacaggtccgtgatgtgctgcatgaaatccgagactgacttcggtatcgcggtggtcgtcataaattcaacttctttgttttgggggatatacatatcaagggaacagcattattctaaaccgctttagttcatgacacgcgaaaggatgtgaagagcatgagtgtgagcgcaccatatgaaaaaccggtgagatttcctgttcggagaatctcaccggttgcgatcagtcgattcgtgaagtcgcacgaatggcggataaggggatgggtggattacttgccgatttcagccagatagtcgggcatctcggccgggtactgcggccaggcaccggcctgggtgcagacgtaggcggcggtgttgacggccttgcggtgggcttctgccagcgtgtcgcccagcaggatgcgggcggtgaaggtgccggagaaggagtcacccgcacccacggtgtcgttcaccttgacgtgcggagtgtccagcgtggagacctcgcccttgcgggagatgatggtggagtaggcggagccggcggtcagaatcacgtagtcgaggccgaattcctcgatgaaccagcgggaggcgtcttcgccggaggtgccgcggatgtcgaacatgtcgcgcagcagcaggagttcctcgtcgttgatcttgaagacggtggccgccttgagaagttcctcgatgaggtccttggagtagtggtcgccacgcaggttgatgtcgaagaacttcatcgcgcccggcttggtgtgcttgagcagctccgtgatggtggcgtgcgattcgggggagcgcagggccagggtgccgaagcagacggcgtcagccttggagactacgtcgatgagctggcgggtgtacaggatgtggtcccaagccacgcccttgacgatggtgtactccgggatgccgttcttcagcgcgacctcgacggtggaggtcggccaggcgttgcgctggatgacggtgttgatgccggcctcgttggccttggcaatcagttcgtcgccgagctcatcctcgccgaccgcgctgatagcccagccttcggtgccgttcttcatcgcgtggtaggcgaagttgacgggggcgccgccggctcgcttgccgctcggcagcatatcccacagcagttcaccgaggctcagaacgatcggggtagtcatggttggtttcctttcctttgtttcttttaccgggtgtttcgtatggaacatcttgtgatgtcggcgcttggtttaggagacgtcgaagaacaccgaggggtgttcgaggaattgggtcaccgccactgctgcggcaccggagaccgccgcgtcggcggacagggtggataggctgatggaagtggaggcattgatttcggggatggcccgttcggccaccgtggcgcgcacctcatcgagcagtatcgggccggcttcggacacgatgtcgccgatgatgatgtgctcaggattgtatccattgaagatggtgacgcatccgtagccgacgtatcgggcgacttcgcggacaatggcgattgacgcttcgtcgccgtcgccggctttggcgaacagggcgcgggcggcttcggtgtgggtcatatcggccgcgccgggaaccacggtgccatcggcgatgagcatgtcgtgaatggcgggggtggagcagtagcgttcaaggcagccgacgttgccgcaatcgcaggggcggccgttgacgtcgatggagatgtgtccgatttcggtggcggcaccgaggaagccgttgatgagacgaccgttgtcgatgacgccgaggcccacgccttcgccgaccagataataggcgaggttgccgtcggcgtgcaccgacgggtcgaagagataatgtgcgagggctccggcgcgggcgtcctgttcgatgaacacaggcacgcggaaagcggtggcgaattcgtcgatgaagttgattttgcgccagccctgcatgctggacaccacggcggtgcggcctacgttacgcaggtaggggccgggcaccgccatgccgatggccacaatggacgggtcgttgtcaagcagttgttcgacgcgctggtggatggtgacgatggtgtcgttgatggtgttgccgtacaccgtgggcaggttttcaaagctcagggtgttgccgcacaggtcgaacacgccgatctgcaccagcgagcgggcgaatttgatgccgatgatgcggaaccgcgtggtgtcgagtttgagaccgatggaacggcggttcttggaaccttccaaatcgccggtctcttcaatcatgccg

SEQ ID NO: 3037 - DNA, 7100 bp, Unknown
  R19_24m  MAG No. k141_19696
acctcgtcggaggccacgaagcggccctcgccgtgggagatggccacggtgtggatgtcgccgaccgaagtcttggacagccacggggagaggtcggaggccacgcgcgtgcggaccagtcggctctggtggcggccgatggtgttgaaggtcagcgtcgggcaggcgtcggtcatcggcacgatgtcgccgtacggcaccagacccagcttgacgagcgcctggaagccgttgcagatgccgagcatcaggccgtcgcggttcttcaacaggtcacgcacggcctcggtgacggccggcgcgcggaagaacgcggtgatgaacttggcggaaccgtccggctcgtcgccgccggagaagccgcccgggatcatcacgatctggctcttgttgatctcatcgaccaacgcctgcgtggattcggcgacggcggccggtgtcaggttgttgataatcagcgtggtcacgtcggcgccggcgcgctcgaaggcggcggcggaatcatactcgcagttgttgcccgggaacaccgggatcaccacatgcggcttggccacggaagagccgacgtacacggtcttcttcggcgcgtggaagtcgatggtctcgacggtcgcgcccttgtcctcgcccttggaacggtacgggaacacggattcgatgccggactcccaagcttcctgcacagcgtccaggtccagcgtctcgccggcggccttgaacacgtactcggaggtggtggtgccgatttcgccgatctcgaccaaattggagacggccggaagcttggcatcgtctgccagctcgacgatgaacgaaccatatgccggggtgaacaggtcgtccacggcgatgctgtcgttcagagtcacgccgatgcggttgccgagcgtcatcttgaacagggcttcggcggtggcgccatagcccggcgtggagacggccagggcatcgtggaagtcggtgagctcctcgatcacggagaacacctcaagcagcgcatccttgtccggggtcagaccgtcggccaggtagcgcggcgcgatgcgcacgatacggtgatcggcgtccttgaattcaggggaggtggcgcgcttcatgttgcccacggccacggcgaaggagatcagcgtcggcggcacgtcgagatcctcgaacgaaccggacatggagtccttgccgccgatggcgccggcgcccaggtccacttgggccatcagtgcgccgagcacggcggccgccggcttgccccagcgttccggctcgtcgcgcagcttctcgaagtactcctggaagctcaggtaggccttctcatgctcgaagccggccgcgaccagcttggccagcgactcgaccacggacaggtaggcgccggtgaactggttcttggacatgatgtacgggttgaagccccacgccatcgccgaagcggtggtggtctcgccgaacaccggcagcttggcgaccatggccatgttcggggtgagctgacgcttgccgccgaacggcatgagcacggtgcccgcgccgatggtggagtcgaagcgctccgaaaggcccttgttggaggccacgttgatgtcggtgaccagcttgttcatacgctcggccagcgtgccctcgccccacggggtctcgtaggactgctgtgcctcgacatgcacggtctggtgcttggaagcgccgttggaggccaggaactcacgggacagattcacgatcttgtcgccgttccaggtcatcaccatgcgcgggtcctcggtcacggtggcgatcaccgtggcttcgaggttctcttcgcgggcgtagatcaggaactcgtccacgtcctcggcggccacgtccacggccatgcgctcttgggattcggagatggccagctcggtgccgtccaggccctcgtatttcttgggcacggtgttgaggtccacgaacaggccgtcggccaactcgccgaccgccacggacacgccacccgcgccgaagtcgttgcagcgcttgatcagacggcaggcatcgccgcggcggaacagacgctgcagcttgcgctccaccggagcgttgcccttctgcacttcggcgccgtcgagttcgagcgattccacgttatgcgccttggacgaaccggtggcgccaccgatgccgtcacggccggtgcggccgcccagcaggatgatcttgtcgccgggggccggggtttcgcggcgcacatggtcggccggagtggcggccacgaccgcacccacctccatgcgtttggccacgtagccggggtggtagatctcgtcgacctgaccggtggccagaccgatctggttgccgtaggagctgtagccggcggcggcggtggtcacgagcttgcgctgggggagcttgccttccagcgtctcggagaccggcacggtcgggtccgcggcgccagtgacgcgcatcgcctgatacacgtaggaacggccggacagaggatcgcggatgcagccgccgatgcaggtggccgcgccaccaaacggttcgatttcggtggggtggttgtgggtctcgttcttgaacaggaacagccagtcctcgtcgtggccgttcacgtcaaccttgaccttgacggtgcaggcgttgatttcctcggactcgtcaaggccggtcaggacaccgttcttcttgagccacttggcgccgatagtgcccatgtccataaggcagacgggcttggcgtcgcggccgagctcgtggcgcatcgccaggtaacgctcgaaggcggccttgacggtggcgtcatcgatggttacttcgtccagctcggtgccgaacgtggtgtgacggcagtggtcggaccagtaggtgtcgatcaccttgatttcggtgatggtgggctcgcggccctcctcgctgaagtacttctgacagaattcgaggtcggccaggtccatggccagaccgcgctcgtcgatgaacttctggccggcttcggcgtccatctcgttgaaaccggcgatggtctcgaccttgccgggcaccggcacctgggtcttcagggtttccttggtctccaggctggcctcgcgggcctcgaccgggttgatcacgtaatgcttgatggtgtccacgtcggcgtcggtcaggtcaccttccagcgcgtacagcttggcggagcggaccgtcgggcgctcgccctgggagatgagctggatgcattcggcggcggagtcggcgcgctggtcgaactggccgggcaggaactcggtggcgaagaccttggcgccggcgaagtcgggcaggtcgtaggccacattgtccacctgaggctcgctgaacacggtgggcacggtctggccgaacagctcttgggagatgccttcgacgtcatagcggttcacgatgcgcagggccttgaggccgttcagtccgaggatcgtgcgcagttcgcccgcaagctgctgggcttcgacatcaaagccgggcttcttttccacgtacacgcgaaaaaccatggaaatcctttcttgaaaatattgaaaaattgaagaagtgcggtaaaagaacttggctcccctctctgaggggagctgtcagcggagctgactgaggggagttgtcatggcggtgaacgtcttgacctcccctcagtcgcctatcggcgacagctcccctcagagagaggagccagctgtatgtttctgctacctgcacctaaacgacttactcggcgacttcgatgccttcggacttggcgagttcggcgaggcgctcctcgagctcgtcgtaggccgggatgatgctgccgagaccacggcggaacaggtccttgtcaaggtgctcgaccttgccggagtggtccttctggtcccacagacggcaggaatccggggtgatctcgtcggccaacagcagcgtgccgtcggtggcgcggcccatttcgatcttgaagtcgaccagcttgacgtcgatcttggcgaagatctcgatcagggcctcgttgatcttgcgggccagcggggcgatctcggcgagatcctcgcgagtgcatacgtcgagggccaccaggtcatcgtcgttgacgaacggatcgtgcagatcgtcgttcttcaggaagtactcaagcaccggctccttgagcggcaggccttcctccacgcccagacgggagcagaagtggccggcggccacgttgcgcagcacgatctccaacgggaacatgttcaccttgcgtaccagctggccggtgtcgttcactcgcttgatgagatggctgtcgatgccgcgcttcttgagcaggtcgaagatgatggtggtgatgaggttgttcaggcggcccttgccggtgaagtcttccttcttttcaccatcgccagcggtggcggtgttcttgtattcgacccacagaacctcgggatcgtcggttgcgtacagttgcttggccttgccctcgtagagcttttccagcttctccatgactcacctttcaggagtggaatttctgggtgaactaacggtaaaagggtaccaatcgagggctacaacaacactcggcatgacgctacgatgcggccagcgcatcatatgtcgcctcatcgaacggccatacgctgttgggatggcggaggcggacggtattggtccgacaatcgactcattgccggtcgcatagtcgttcggcgtgacagtatctacgcaagcgcgcggacactcagatgttcgtcaatagacaaaacgtgagtgtacggccgcgcacgcacgataatgggagtgacgaaatggtgcaaggaggttcgtcatgatcgatcatattggtttgtttgtttccgacgccgcacagtacgcggatttctacgagaagctgctggccccgctgggttacgtcaagaaagtggcgtacccgaccgccgtgtgctttgccaatgacgaggatggcgacagcgtttggctggagtctccgaaggacggcaacccggtggtgccgtctcatgtggcgttccgcgccaaggatgaggacgccgtcaaggcgttccatgaggccggtctcgcctctggcggtaccgacaacggcgctccgggcccgcgcccgaactatggccccacgtattacgccgcgttcatccacgacccggacggcaataatattgaggccatgctgagctgatcaggccgtggactactccacggtaatcgtcaacgcatcggcaacacggccggccttggcacgggcgtcggcttcggactcgccgacggccagtgccacggccatgcggcggtggccatgcacttcgggcttggcaaaaatgcgcaggtccgtgccgggttcggccagagcagcggccacatcggtgaactcggcctcaccgtcgccggccaccacaatcgcatggcttgccgccaccgagccggccggaatcgtgagcgccacatgctcgggggtgatcggcaggccgagaatcgcgcgggcgtgcagcgcgaactcgctcagacgctgggaggtcatcgtcaccataccggtatcgtgcggacggggggagacctcgttgaacagaatcgagccgtcggtgagcacgaacagctccacgccgaatacgccccaaccggtttcgccggtcgcctgagccttggccaccaagccttcaacggcggtacgtgcgatgtcgcgcgcccgctcggcctcgccatcgggctcggtagccggctgccaggactcgcggtaatcgccggactcctgacgttggccgatcggcgcgcacgtcacaatgccggcggacgaagaaacggtcagtaccgtcagctcacgctccagcggggcaagcgcctcaacgatcacgcgcgacacatcgccctcatcggcggcgcggcggccctcctgcgcttcggtccaagcggcatcgatggcgtcggcggaacgcaccaccgactggccgtgaccagacgagctcatcaccggcttgaccacgcacggatagccgacttccgaagctccggcgcgcagctcttccagcgagccggcaaaacgatacggtgtagtcggcaagcccaattcttcgtgggccagtacgcgcaggcgctcgcggtccatgcagatcgcggcgatttcggcgctcggcaccacctgggcgcccgcggccgcagcaccggccagcacatcggtggcgatggcctctacctcgggcacgatgatgtccggcttgatttcatcgaacaatgcctgcaattcggcggcattcgccatatccaacgcgcggtattcatgcgccacctgctgggccggagcgccggcatagcagtcagcagcacacacccatgcgcccagtcgcatgagttcaagtgtgacctccttgcccagctcgccagcgcccaaaaacagcacacgggtggggtgcttgcccagcggtgtgcccagcgggtggttggctgcgcgagttgcgggggggacggcggaagtctcagcggaggttgcgggagaggaggcggaagtcacggcagtattcacggcgttctcagtcatacccacattctgccatgacgcgatgatttcggtatgtcgcgtgagcggagtgcctcgcgcggcaaaattacgggcggaatatccggcttcatggggcggtaaattccccatggggcggtaatgagtccatggggcggtttgttggttttgtgaaaccgcggaattaagccgttttgccttaccgccccatgggaatttcaccgccccatggggtaaataccgccccatgggcaggttgccgccccatgaagattcagatgcccgtaacccgccataaatactgcgtatagacacgccattgcgtgtgtaacagagccgtcgtaccttagcaattaccggccgatgaagtatggggcggtcgggccaacattttgggatgcgacatatagcgaatagcggcgtgtcggttccggcgtttcaggctacaagccggcacgctggcaatagtcgaagtacttaacgattccgcctatgcggggctcgaattcggtgacgtacgctcgctgagcctgctggagactccgggcgcgctggacgtggcgctggaacttggctcgctgtccaaaatgtatatggtggccggctggcgcggtggcatggcgattccgccgcattc

SEQ ID NO: 3038 - DNA, 7300 bp, Unknown
  R19_24m  MAG No. k141_20054
ggaagcggtacagggtcagggccgcgcacgcgaagaacgcgacgatgatcgacaggacgatcgagatggcggtcacgaccacgctgttcttgaggttggtcaggaacgaggtctgggtcacggcaacgatgaagttgtcgagcgagaggtgcgtgggccagaacacgggggttgtggtcatgatttcgtcgcgcggctttacggcggtgatgatcatccagtagaccgggaagaaccatacgacgcagaacagcagggcgaggatagtggtgccggcgcggcgcgcgatcttgccggggttggttcggcggcggggcgatgcggactgcgctgcggcctgcgatacggcctgtgcaggacttgcactcattgacgtactcataggtcctctcccgacttgagcaagtaacggatgtacacggaggtcagtgcgagcagcacgatggtcacaagcacggaggcggccgaaccagtgccgatctcgaagctgacgaacgccttcttataggtgaagatgccgatggtggcggtcgtgtcctgtgggccgccctgcgagatgagccagatctggttgaacacgttgaagtcccagataatcgagagcatggtgatgaccatgatgctcggggagatcagcggcacgacgatctgccagtagcagcgcagcttgctgcagccatccagctgggcggcctcgatgcaggactggtcgacctgggtggtggccgcgtacagcgtgatggcgatgtatggcacggcctgccagaccacgagcagccagatctccagaaatgcgagccaggtgttgtcgatccaggaggtgttggtcatgtcgccgaagacgtgcagctgggtgagcagccagttgatgacgccgtaaccgggctggaacagccacttccagaccaccgaggatgcgacgttcggcatggcccacgcgaagatgagcacgaagatgaccaggtagcgcatcacaccgccgagtttggtcatcagctgggcgactcccatgccggccagcacgctgccggccacgagggctgcggtgaagccgaaggtgcgtagcagggccgcatagaaggccgggtcggtgagtacggattggtattgcttgaggccgacgaagtcgaattcgccggtgaacagcgtgcgctggctgaaatccgtgaaggacgtgaagatcatgaatcccagcgggatgaccaccagtgcgatgatgacgatgccggcgggcgtcagcagaaacgccggggcgcgattgccgcgtttcttagccggccgtgaggccggggcctcgccgtgcgcgagttgcgttgagcttgtcatggtccaacccatcacttggcatacagctcgttggcgtgttcgtcgaacttcttggcggaggcctcggccttgctggtgtcggtggcgatgtccttgaacagggtcagcgagccgtcgctttcgatggtggtccactgcggggaggcgggcgtggccttggtgcgcttggcggcctcgaagaagccggtcagggcggtcgggaagtcgtcggaggccatggccttgtccagtccttcgacgttgttgggcaggtagccgtccttggcgaacacgtagtcgttctggatgtcagggctggaggcgatcttgatccacttcagggccagatcctgcttggagctcttctgggccacgccccacacggagccggccatcatcgacggctggttctggccgctcaggccgggcatcgggaaggagccgagttcgtcggcggtgatgtctttgttgtattcctgaatcacgcggatggaggcgctgttgccgattacggcgccgatcttgccttcggccatgagctggctggtgtcggggctatcggtgtcgagcgggcgggaggcttcggatgaccacttgtgctggaattcacgccactgctcaaggccggacaccgattccttggtggacagggagctgacccatttgccgtccttctgcacggcgtagtcgccaccggcgtcccacacccactggatggcggtcttccaatcggcacccggcacatagaacggggtgaagtcctcgccttggtgcgcgtccttgagaatctgcaggtcggcttcaagctcggcgtaggtggtcggcggctcgttgatgccggccgcggcccaggtcttcttgttgtagaccactgcgcgggcggcaccgagggccggaatgccgtacagcttgccgtccacggtggcaggctcttccagaccggagagccaggtgacgccctggcgcaactcgtcagcgtggtcggtcaggtccatgaggccgccgctggccgcgaagccggcgacctgcgtattgccgaggtcgagcacgtcggggggggtgctggtggacagagccgtggtgattttggtgctgatgtccttccactgctggttctggatgttgacctcgacgccggtctctttggtgaactggtcgttgatggccttgatggtggcctcgctttgatcgccctgcatgacccagacggtgagcttgccatcgctcgaaccggtgtccgaggatggtgcgcccatcgagcatccggcgagggtaagggccgctgccgtgacgatggccgtggcctggagcaccctgcggatggcggggcgtacgttgtgctgctgcttcatgatgttccttcccgtccagttgtgaaccgttgcggctcgcttgatctggccgtctccattgactggtgatttcttgtaaacgtttacgagaaggagtataacactcacgtaaaggtttacaaatatcatgtgcgtgtcgtacttcacttaatatcggtaaatctcttttactatttacttcgtacacccttacggcagagaatgtttaccgactttcatacgccggcacggcaatccacaggcaccggacatgggccatgcggaatcatcaggaaaatcgcgcggtacaatcactgtgaacggccctaggacaggaaggagacgggcatggccataccccgtaagccggccactatcatggacgtcgccgcggcatccggcgtctcctacgccaccgtctcccgttatctcaacggcaatccgcatgtctcggccaaggcagccgagcgcatcgccgccgccgtcaagcaggtgaactacacgccgaacaacgccgcccgatcattggtacgccaacgcacgcaaaccgtggcgttcgtggtgcacgggcagccggattcgctaatcgccgaccccaatatcaacaccatcctgctcaacgccaaccagacgctcggcaatgccgattatcaactcatcacgctgatctccgactcccctgcggccggcgcacgcatcgccagactcgcctccagcggattcgccgacggatggattctcaacacgttccataaagatgacccgctatttcagagattcgccaatatcagcgtgccggtcgccatttccggcgtcggctatggcagcgccatccccttccccaccgtcgatatcgacaatcgactcgcttcacgcaagctcaccgagcatatgttggggcgcgggtatcggcgaatcgcctatatcatcggaccgccgtacttgccatgttccgacgaacgactgctcggattccaggatgcgatggccggcgatttcgacccggcactggtcattcggtccgacggctggacccggcccgatggccgcaacgccgtcgtgcggctgctggactcgctggctgagccgtcgggtagccgacttgccggcgccgacgccagcgtgcccgagctcctcgccgagcatcatatcgacgcgctgatatgcggcagtgattgcatcgccgctggagccatgaattatctgctcgaccgcggcgtgcgtgtgcccgacgatattgccattgccggcttcgacgacagcgccgacgccacagccctgcacccgcagctgaccaccgtgcgccagccaatggacgcattcggcgtcagcttggccaccctagtgcttgaccagatcgagggccgaccgttccagcgcacggtgttcctgcccaccgaggtcgtggccagaggctccaccggagagtaggcgcgcagagaacggttctcaataatatctgtgcgcacttctctacgcccgaagcgcacatggaatatgccctaatcactgccatgtcgccatttgcgatgatgtgagattgttatgttcttgttcatttgagcgcacagatactactgagaaccgttctctgcgcaaatagacaatgtggataactccataagctggaaccacattgccctgcctggcttgcattcaagtccaaatcagctttacggtcgcatcatgagctcttttatgcatgaggatattgtcggccgacgccgagcagaacgtgaacgttgcaatgatgctgcgcgccgttcaaaaggtccattgctggtgggatacatcaatgcggccaactactacggcgcgcccatcccccgacattgcacgctatctgttgatgccgtgcacgcctgtgtttccagtgccaacaaacgcagacgaatcaaaggcgtggtcttccatgtgtttaagggaaaactggatatccgcaaaaaggactatgaacacttctggattgcctcgccggtcatgatgtgggctcagatggcccaatactccacattggaggaacttgcggccattggagcctctttgatgagccgcgataaacggcgcagaatggccactcgcaaggatttcgatacttacttggaaatcagtccgcggttcataggtcgtaacaaatgccacgaggcactgccctacatgacagagaacacggattctccgccggaaaacacgctgtttgggatgctgaaggattcgggcttgggataccccaccgccaactatcgcgtgaatatcggcaactcatacgtcatattggatatggcatatccggactgccgcgtcgcgttcgaatatcagggagcctatcacgccgatccggcacaaatgcgaattgacgcggcaaagcgaaacgcattgcaactgctcggctggatcgccattctcgtcactgcggatgacctgagaacagccgacacgcggcatcgttttatcgagatggcccatgtcgtggtgtcccggcaacgcaatctcgccgattggaaccgctcatgggccattacctcttagcatcgcaccgataatgcgctatgccgctatttaccgcgaggtgcccgccagacatcgggctcgacgtagatcccccattcataccaaggcagcgcggcacggcgtcctcgtccatgtgaatggcctgcgggttaatgcagcctatccacgccggcagtgcgctccactgcctcgaccaccaggtcgcgggtgctgtggtcaagcgattcgcccaccagcagcgagccggacttaaacgccagccgcctacaaaagtgtgaggctgcgcaggctcacactgccaacagccgttcggccaacccccgaaagacctggccaatgccatccgtgcgcaaggcgccatcgacatccagcaccgcgggacggcctgcttcgccgatctcgcgcacttcgggttccagcggcagctgggccatcagcggcacgtcatagccaagcgccgcgcttaactgttcagacacgcgctgaccgccgccggcaccgaaaatctccagcttctcgcccttgtgctcgtagtagctcatgttctccaccacgccacgcaccttcatcggcacctgcagggccacgagtccggagcgcacggcgatgtcggaggcagagggctgcggggtggtgaccaccacgagttcggcgttgggcagcgcctgggccacggaaatcgccatgtcgccggtgccgggagccaagtcgagcaagaggacgtccggctcgccccaccatacgtcagacaggaactgttccaaggagcgctgcagtcgcggcccgcgccacagaatcgcccggtcggcaccggcgaacatgccgatggagatcagtttcacaccccacgcggtgaccggcataagcataccgttcagattggtgggctgcgtgtgcacgccgaacaggcgcggcagtgagaagccatagatgtccgcgtcgatggcggccgtgtcgaagccgagggccgcaaacgtggcggccaggttcgcggtaaccgaagacttgccgacgccgcccttgcccgaggcgatggcgaagatgcgggtcttgacgcccggtttgctgaaggggttccgcttgcgttcggccttgaggtcggcgaccagatcggccagcttgtcacgactcatcgaaccgacttcgatatgaggcagcagctgtacgcccggataggagctgaccgcgccgttgatctggttggtgatggtctcgctcagtgggcatccgggaaccgtcagctcaacgtgcacggtgacgtcgtaagtgccggcgtccgacgatgcgggcgcggcttcgatagcggcaatcatgccgaggtcggtgaccgaacgaccgagctcggggtcgatgaccttgctcaggcgttcgtagatgtcggcttcgatctgacgtgcgtcgctcataaatccgtatcctcctttagggcctgttctaccctagcgtgtgatgcggcggcatgccagagggagtggagtaagtcacactggggcgggattcgcttttcctctcccccagtcagcctaaaggctgacagccccctcatcagagggggttaatgaagcgtctgagggggctattttagatggtgccggtggctaggagctgggcgaattgggcttcgcccagcatggggatgccgagttcctcagccttggtggccttggagccggcgtttgcgccgatcaccacgtaatcggtcttcttgctcaccgaaccggccgccttgccgccgcgctcgataatcgcctctttggcggagtcgcgcgaatagccctccagagaaccggtgaccaccacggttttgccggccagcgtctgcggcaacgaactggtctcggcctcgtcgacgcccacgccggcggcctgccaagcacgcaaagtcgcgccgcgccagtcgccgggttcgcgggcggcggcgaaccagttcaccaccgattcggcgatttccgggcccaccccgtcgatggccgtcagatcttcaatcgtggcgttttcgatggctgccagcgagcccatcgccgaggcgatcaggcgtgcggtaggcggaccgagccggcgaatcgacaacgcgaccagcacacgccacaggtcggcgtgacgggccttgtccatttcgtcgaacatcttgcgcgtgttttcgccgggccgaa

SEQ ID NO: 3039 - DNA, 6568 bp, Unknown
  R19_24m  MAG No. k141_20541
agtgtcacgccgtcacctctttctcgacttcgcccttggctgccgccgcctgagcttcatggtctccagtatcatcacggccaacgacggcggccgaacgccggacgagaatctttcgtcttgggcaccgtccgccacctgcaattcgaactagctgaaccagcgtgacgatattgtcggctatcgatctgccgtgatcgtaatggacatcgtcgtccggaagcacgtcaccggttccgagaggagtcggcggcgcgctttcataagggcacacaatcccaagatcacacccacagatcaataccgatcaatactcgtacgtgatcgcggggtcgccgatggtcggcgtctgatccagtttgaggttggccgagccggccgcggtggtcacgtcgtattcgatggtcaccgtgtcctgaggtgccagggagatgtcgtccatgtaggtcatatggtccttggcctgcacctgtgcgaaggaaccgccgttcgacgccgacacgttgctgacctcgcctccggccggcgtgtagatgaccacgcggttcaccgccacgcctcccttggcgttcgccgtgatgtattccggcagggatccggcctcgcccggctgcagggtgttggtgaacgaatacgtaacgtggtaggtgttgtcgccggtcctcttcaccgtcgacttgcgctggatgtaccagtccatcttcgaggcctgcatctcgttaaagtagacgccggtcaccgggttcttcgcgtcgttggtgatctcgccggtgacgccggcgctgcgcagcaccgcctgatcctcctcgtggaacgaccagaagtacaggtgccgctgctcggccatccggagcatcgtcttggcgacggtcatgagcttctgcgtgttcatgtcgctgaacaggtgggcgaccgcctgggtggcggtctcgctgaagtactggtcctgagcggagggcgtcagttccttgtaggcgccgttgagcaggaattcggcggtgttcgacccgttgagcacgcgtccgtcagacagggtcacgtcgccggtggcgccgatcatcgcctgcagcgcgacggggtcgagcgacatcacgccgtcggacgatccgccaaacggagccgcctgccagaacttctgggccatggacgcgacgcgcgggaagtccggcgtggacgaaagattatggatgacttgaccgaagtacagtccgctgtacagcgtgccgtcaccgtcctggttgacgtcatccaacgcggcgttggaggggaactcggcatccgcgtggaactcccccaccgcgatcttgccgttgtccgcgctgaaggaaccggccgaaccgatcaggccgccggttccgcggatctcggaattcgtctgggccagcagcacgtagttgcgggcgccgttcgcaccgaggaagttcggcagcatgttgagcatgccgctcaggttttcggtcacctgcgccagggcggccatctgcgtcttgccgttctgcagcgcgttgttcaccacgccgagtttggcgtcgggaagatcctggatcgtcctggcctgcgattgcacggactggtcgaccgtggcaagctgctgcgccgcggcgatgatcggctccatgttgagctgcccatcgccactggagaggctggcaccggtcagtgtggtgacgaccttgcccagctggggcagcgtggtctgcgcgaagtcatcgatggtaccgatggcggtgcgcgccgtcttcacgtcaccgccgaccacgggcatcttctccgccagcgtccacagaccgccgctgacatcctgcttggcggcggccgcctccttctggatgtagctcacgtcggacagcgccttgaccatgtcgtcggtggaaccgtccttgatgaccttggccgcgttgacgacattgttgaggtgcgctttggcgctcatcgccgacttgtacagtttgaatccgctgaagccggccgccgcggcgcacatgaccagcaacagcagcacgacgagcagcgcgttgcgaacgcgatgggttgtcctggggaccgtgcgtgcgtgtgatggcatgggctacttccttacgttatgacatgtatcgatactggctggctgcccggttacgctttcgctggacgggtagcccggcggacggcacgtagcagtgcacgacgtgcgcaccgcgtatgatgccgggggttgtcagcgcggctgactggggtggccgcggaccggtacctggacttgcagctgccctccggcgatgcgtgtcacctgcagcggggaacgtccgctgcagttacggctattaccggccagccgacagcaatcgctggtttagttgttggtcttttccggctggtcacccgttcccatgagctggcatgcacctttcagcgagtatctctcctaccgcatgccagtctacccatgcctgcgggataacccaaaaagccttgcaagaataccgaatttctttacctttggccctgatcgttcgacggctcgcaagacggcgtaacctcatccaaccggccgatccccggaggcggaaccagcggaatcctcgtgaccgggaatgcgatcgttcccgcttgcgcgatggcggatgcgcgcaacgccagccacaggtacgagaccgactacttccgtacaggatccgttgtggtcgcattccatcgttcagcgcaacgggccataacgccctaaacgatgccagccatgtacaacggcacatctcggatcggccccacatcccgataccggtcagcagagaaacgataagcaagcggataaccgtgcctcttctgcatgattacaagcgatttggcctgtcgatgagtcccctccttcacttccacgggcaccgctttgccattcctctcgaacagaaaatccaactcaccactggagttctcggccgaccagcaatagggtgaatggccgttcatcatggtcaattgctggcatacaaattgttcggcgatcgaacctttgaactctcgaaaacagtgcgtcaccttccagcaacacacgaacattcagaccgctcaacgctcctagcagccccacatcgaggctgtacagtttaaacgcagagccgtctgcatatgccgccaatggttcaagaggcgcactcacccgattcacgcgcaacgccaacgacgcatcgacaagccactgtatggcactctcaaaatccttgccacgtccaccagctcgcaccacgccgtatacgaacttcttgttctctttcgccaactgggaaggaattgaatcccatacctgattgagacgaagcgtggtgacggcgggactatcacgcatatcaacatgtttggagaaatcgtcacgataatcggagaccagactattctgcaatttacgaaccgccgtgaagtcaggattcggcagagtactggcgaacgcttcaacgatctccggcatgcctcctgtatacatgaaataccgcagccaagtcatgaccctgtcatgcattacgttaattagcggaaaatccttgggctcaagcatttcggccaaggcatactgtttgcacgcatacaggaattcaacaaaagacataggatacagcttgagtctactgaccttgccaaccgggaatgaaaacccaggatgcatggcgatgcccagcgccgatccagtggccaagacgtcatactccggggcgacttcattgaacatcttcagcgaagtcatcgccctcggcacctcctgtacctcatcgaaaatgacgagcgtatcctcgggagtgatcctagttccggactcgatcgacagtgcgggaatcagccgttccacattcagatccgcatcaaacaacatacgcatgttggcattgtcgaaaaatgtgacacagcagcaatacgtaaggtacttgacaatctttgatggagtcgtatactcatatctgtcaggtacttgacataattactgaagaggatgaaaaagacacacgaccagcgacgcttcgctcgcttccttattaaaggagactggcatgaacatcacacatgacatgagcaacgacctcaccgaatacgacccggaatcccgtcaagtagacggaccgaaccccatcgaaaaccgcatcagctcctccgcggcccgtgttcccgacatcatcagctgcacttccggcatcaccgtccagggccgccaactccactcgttcgcgttcaccacggacgcggccatcatccgcaacaccaatgccgacgccattctcgccgtatatccgttcaccggcgaaccagtcatcacccaggccctactcaccgtggcccaggccccgctgttcgtcggcgtgggcggtggcaccaccaccggcccgcgcgtcatccaactcgccatgatggccgagatgcagggtgcggcgggcgtggtgctcaacgcgccggcgccgccctccacggtgtacgacgtggcgcgcatcacgaacaccccggtcatcgccacggtcctgacctgcgatgacgaattggacgagaaaatcgaggccggcgcctccatcatcaacgtggcggccggccgcaggacgcctgacgtggtccagcagatcaggcagcgtcacccctccatcccgctgctcgccagcggcggttcgaccgacgagtccatggccgaaaccatcgtggccggcgcgaacgcgctgacctggaccccgccgaacgcgcaggagatgcagcgctcgatgatgatgcgctatcgcggcgaatccaccgacgacaacatgcagcactgacgtaaggattccgaacatgagcagtaccagcaacaacgccgccgtaaccggaaacgacgcggtcgacaacgtaatggccacgagtcaatcggcggagaacggcacaagccacaacaccgccgacggcgatatcaagaacgatgttctcagcagtttcatcagcattggccgcatcatggcgtatcgcgcgatacacagacggctcgtctcccccggcgtcaaatcgccgcgcggcgaacatgctttcgacccgcgccgcggccaaggccgcgtcttggccacgctcagggaatccgaccagaccagccagaaggacttggccgcgatgttcggcatgagccgccaggccatggccgaactgttgaagaaactggaggccagcggtcacatcagccgccgtccatccaggcgggacagccgcgtcatgatggtcagcctcaccaaccagggccgcaaggccgccgatctgctgggcaaagcgcccgaccagacctcctccatgctggactgtctcaatgaaaccgagctacaaaccctacacggctacctgcagcgcatcatcgacacctcctccgacgacctaccggcctcgaccgccgaggatgtcaaaaagtgtgagctgcttatcgaacacctcaagcgcaggcgaatgccggccgaccgcgcatagtttgcgaacagcccgcacgacttgtggccgcataagcatgcggccgcacaacagtccagccgcacagtcatccagccgcccctacaaacacgcccgattcaccatttgcacgacatcttgcaccaaaccctactttgaaatgcggtattttgcgccaaaaccccattttgaaatgcggcattctgcacatacaaggcagaaaatgctactcccataagggattcggaaaggaactgccatgcttgagcgcaagatctcggacgatctgttggaatggaagctgatcggcaccggcaaagcactgctgctgaccggtgcctgccaaatcggcaagagctacgcggtacgcgagttcgccaaacacgaatacgctcattaccttgaaatcaacctgtacgagaacaagcaggaggcccgcgcgctcgcatcggcgaatgacgcgcaggagttcatcagccgacttaccttgttctcaccttcaacgctcactcccggcggtacattgattttcatcgacgaggtgcaagaggcaccggatgtaatgaccacgtcaagtttgatgtaccggcgtcgcaattcgacgatttgacgtttcaccacatgtcgctgattgcgaaaaacagcaagtcgtgattcgagcgtggcatcaccttgcttagtcatatcaacaaaatccttgatctctgcgagactcatgcccgtggatttcagacattcaatgagatcaagcaattcaagatcgccgtcatcgaagcatctccgtccgaaaccagttcaagcgataccgggcaaaagaccttggccgtcatagtagcgcaatgtatgttcggacagcccagtctttcgcgacacctgaccgatggaatatcccatgccaactcctttccctgcagtcgagccagtgtgagtccagccatattcacggatgtcctatgcggaacggacactcttcgactgcctgaaccttgcagcccaaacatgcatcaatcagcacaaatcacagacagtgggccatatacaacggcagcttgatgcgttctccatccacttcgagttggcggggatgcagaacgtattccttgcccaatcgttgggcataccttttgcggaatttgtcgagcgaagatacgccgtatcg

SEQ ID NO: 3040 - DNA, 4973 bp, Unknown
  R19_24m  MAG No. k141_20913
ccgtagccgatggtctgcataccccagccggcgagtgccacggccacgccataggcaccgtactgcaacaccatgctgcccgctccaacgcggccgagcttgtccttgcccaccaaggtattgctgaggcctccaagcaccgcgttgcccgcgggcaatgccagtaccgagcaggccacaaatatggccttgccaaccatggagggcaccaacgcggcaccggtgaatcctacagccagcaagacgaacatcacgcccaccagtacgccgccgggcacacggttgaccagttgcgaggccatcagtgcgcccagcaacatgccaacggcggaggcggcgttgatgaatccggcggatatcagctggctgccaccttgggagatgtccagcgcggtcagcagtaggaaggcattgctggcaccggtcaccatggccgctgcgatgatgagatggcgttggaaccggtcgcgcagcagccagatcatgccgtccagtgcgtcgcgccagcgtggggcggagtcatcggcatcatcggcgtccgagacggccccgacctccgaaccggtatcaacattgcccggacggccgctatcgctcacagtcgcacgtttccaatagcggcggatacgccatgcggacaccatgcccagcacgctcagcaccgcgctggtcaggaacggcaccgcatgtcccacggtcatcagcagaccgcccaacggaccgcccaccaacgtgaccgtcgaatcacgagcatcattcaacgccatcgcgtgcggcagctgctcatccggcaccacgccacgcagcatggcattcgacgtattctccaacagcccatcgcgcaccgaaaacagcacgacgatacacagcagcgcgatcggaagcacgtgggcatacggtccgccgaatgccggagcgtttgccccgttaaccccatggccgctcgtcttcggcgcattgccgaacagcatcaccgctgccgccgccaccgccgagagcaccacaccggacgcaccccagatcagcatgagcgtacggcgatcataccggtcctgaatcacgccgccggcaaggcccagcaccgtctgcaccaccacgcagatgctttccgtcgtggtggcggcggcagaggatcctgtcgtggcgagcatcatcagcggcaccgcgaacgcgatcagactggcaccgaccgcaccggacgtgtccgcagccagccaccatccgtaatcagttccccgccataattccgtatcacttgccatcgttgccctccctgggattggtccttatggacgccaccatagggagccgccgccgagccgaacacccgcaatcctcggttatggggacatggctgcggtcgtcgtcctcatttgtgaggacagggcacaatcagcgccggacgccggacatcgcagcttctgccccatcagccccgcacgcacgggatacgcacgtaaatcatccacgtgccatcatccgaacgggtggtcaattcaccgcccaactcctgcacacgggtgcgatgcatggccagcccacgccccgaccgctcctgcgcggacaggccactctgcgcgtcggcatcgtcacggatatcgttggtctcacgaatctcaatccattcgggagacagcgtgacgaacagcagataggaatcatctcccgccggtgcatggcggcggatattcgtgccgatctccgtcatcagcgacagcgcctcggccgccgcctcggggtccacaaccatggcgatgccgttgaccgcggccgtcccccgatagccctgcgcctccagaaactcctcggtatcggtgatctgcgccttcacacgcgtgacgaaggattgcggcatgcccgctgtggattgcgtacggtcatcgccaccggcgttctcgggcacagcattgtcaaccacctcattcgcaatcgctggacagctcccggtgcctaccgggtcacgagccagggcggattctttcgtcggcgaatcaacctgccctgattctgcagtcgccacctcagatgtcccggtgccaccgaccggcaaggactcgtcccggaagccggcgtccattccgctctgctcggtcagaaaatcgatgatgccatgcacttccgcaaaggcacgttggctgcgatccagcacgcgctgccagtcgccaccatcgatgccggctggcgcggccagattattccgggcgatggtcgagatatacgtcagatcgttggacagcgtgtcgtgcagttcgatcgcgagctggttgccgtggcgcagatcggccagcgccgattccatctgctcgttttcgttctcctgattcaccacgcgcttgcgccagcgcaacgcaatgcccagtaacaccagcagcacgcttgccgtcagcgccgccgacgccgtgaccagccacgacccggtcaccgcatagacgatggccgccaccgcaagcacaccgatcgggccgaacatcgccagcggatgcttgagttctatatcgatatcaatctgatgatgcttcttgccgtcggcgtgactatacgaatacgacgaatgccgcgaaatgataatcggacgtttcaccgggccgctccccttatgcgtcttgcgcttcttctaccgtgtccccacacacccatcggcgccttcatcagtgcaggttcatgcgaatccatgcgccgataagttccttgagattgccggcgccgagcttgtcggccgcacgcatcaaatgcgtgcgcacggtggtttcggtgatggacagttcggcggcgatctgcggcatggtccggccgcgggaccacagttccgcaacctccatctcacgtgcgctcagccggttgtccttctcggccttgatgcgcgcggacgcaacggccgcggtctcgaaccgcacgtcgccaccatcgccccatgttttgccggcctgtacctgacgaatcgccacggcctgcaaccgcacatcatcgttcttgctcatgatgccctgtgcgccggcccgggccatctcctgggcatgccggcccacaatcgaggcggtaatggccagtatcgccgtggtcgcgttttccctgcggattgcacgcaccacatccgggccgttgatgtcgttcatcgcgatatcggccaatagcacagcaggcgggcgtttggtggccgtgcacagctgaatggctttgctgccttcgctcgccggcggcagcagctcgaagtcgggcagcgccttcgccagaatcgactgcaatgccatcaaggccatgcggtcgttgtccatgatgagcatggtgggcttcgatccatcccgcccgctgatatccgacatatgcctacgtgcgttcagctcttcttcggcttcagcgctgagggcatgggcatcggaatcggcttgcgcggggccggcttcggcttgggcgcggccggcgcggaggccgggaactcgccgctggtcgcctttgcggcggcttcggctgcccacttggcgtactcgtcgaggtcgtcctcctgcgcggcgggcgagaccttggcggcgtcgacgtcagcagcagaatccacatccttgtccgcatactgatcatcaatatcggcgaacgggtcaggagagcccgttcccggctcctgctcgctcagctcttttgccagctcatcgtaatcggtatcggtggtcaggtacttgagctttcgggcaattttctgctgttttgctttttgacgtccgcggcccatctgaccccctgcgattactgtgctgttcgattcatcaacaatagagagtaccactaatagtggcttgttcgttgtcggctcacacttttaccataaaaagcgtttatctgagccctatttaaaggattttcgcatgaccgacgagcagcaactgacagcggcaggcaatgagatgagcgcgagcttcctcgcggccaaaaagcgttcggacgaaacgctcgccaagctggaggccaagccgtcgtccttcaccatgttgaccggcgaccgtccgaccggccggctgcacctcggccactacttcggctcgatccgtgagcgtgtcgccatgcaggagcgcggcgtcaacacgaacatcatcatcgccgactaccaagtgatcaccgaccgcgacaccaccgagcacatccaagacaacgtactgaacctggtgctcgactacatggccgccggcatcgatccgaacaagaccatgatgttcacccactccgccgtgccggccgagaaccagctgctgctgccgttcctgtccctggtcaccgaggctgagctgcaccgcaacccgaccgtgaagtccgagatggaggcgtccggccacgcgctgaacggtctgctactcacctacccggtgcatcaggcgtgcgacatcctcttctgcaaggccaacgtcgtgccaatcggtaaggacaacctgccgcacgtggaaatcacgcgcaccatcgcccgccgtttcaacgagcgttacgccaagaagaacccagtgttcccggagccggccgccattctgtctgaggcaccggagattccaggtctcgacggccgcaagatgagcaagtcgtacggcaactccatcatgctgggcgccaccgccgaagagaccgccaagcttatcaagaagagcccgaccgattccgagcgccgcatcaccttcgacccggttgcccgcccgcaggtctccgccctgctgaccaccgccggtctggtgaccggccgcgacccgaaggacatcgccgaggagatcggtgattccggcgccggcgcactcaaggcatacgtcatcgaatcagtcaacgagttcctggccccgcaccgcgagcgccgcgccgagctggccaaggacatggactccattcgtgacatcctgcacgacggcaacaagcgcgccaacgccatcgccgaggagaccctcgaccaggtgcgcgaggccatgggcatgaagtactgattttcccgccgctcgtagcaagacgcc

SEQ ID NO: 3041 - DNA, 5523 bp, Unknown
  R19_24m  MAG No. k141_21014
ccatggttccaagtgtctcatgggcttgagaccggcgatggtgcgattgcgggaatggcgcggagagccgtggactggccgcggccgatagccgggaagccgagccgcagcgtgaagcgtcatgcgagttgtctcgcgatggccaacgcgccggcaacgaccatgagcgccgagaagacacgcagaagagtccttttgcgttctcttcccagttttttggatccaatcacgacgtatatcaggaccaatccgacggccagcggcaccaaggccagcagaaacagcggtttttccatggcatctcatctcgaatgctgtggttcagatttttcgatgttcggtttttctgcgcttactgacaagagccatggagcagcatgccgatacgcacagattcactatgcaggtcgccgccggcagtagccgtatgaacggctgactgtagaaatcgaggacatctggatccatagatcctgagtatatttcaaaaaccggatatgatgcgagagccggcgccgaactcacgaggaacagtatccaaatgacgggcaatctcaggatggatactgttcggcctttccgatggacttctttcgagaacatgaaaagagcccaagaggtcactgcgattaatgcacccgcgcaatacaacagaccagagaactcgctacgcatgattccgtcctcacttcagtcgcaggtaatttggcttatcgatcttctggctggttcgagattaccatacctgacatggcagtcgaattgcccgttgtctattggcagagcatccgactgttaatcggacggtcgctggttcaagcccagccgcaggagccagacaaaaacccggaacttcggttccgggtttttgttacccgccccccgaaactcctttatcaaggaatcatccataagggatgccgcagcagacggtctccaaggcactacaccgtgctcatccccatggacgacggcaactggcacgtcaccgtgtactgtcccgcctcgctggacggcccactgctcgacaaggattccaacgaattcgacacggacgacgtgaaacccggcgacaagtcgtacacagttgccaatccattccacctggatcacgcacccggaacagacggtttcatcttcggccctgacaccctccgacaatagcgatggactaaccattcaaccgcacgcgtaggaggagcgcattccaaccatgaatgaatgacatatagacgtcaagggcttgcggacatcgtgtccgcaagcccttgacgtctcaatccaacgaaatatcgacttttacccgtttgtcggattcaggctttcgcgcaagtccggcgatgaggagggccaccagcagggggatcgtcgtcagtgtaccccaggaaatcgagaacgtgtcggcgatgtagccgcacagcggggtgacgaccgcggtgaaggccatcaatacgagcgatcccacggagaacgcggtcgcgcggatcgaatcgtcaatgctctcgtgcaagctgctggagatcgtgttcgccacgtacatctgcgcgcaggagaacacgaagaacgccaggatcctcaccgccggcatcggcgtggccgcaagcaccaccgccgacacgatgagcacgaggatcgcaatgtcgccggaacgtggatgcagccgcagcatacccagacgactgccgacgatctgcgcgatattagtgaacactaggccggcgaactgccaccagaccccggtctggtggcccatcagcagcagctgccagaacgtcagcaccgacaacgtacccagattgaacaccaccatattccatatctccggcttccgcagcagcacggccgcggccgccacggtctgcctgacatgatccaacaccgtcagcgaggtcccggactcgcccggctcggcggatccatcggattcgacggacgcctcggcctgccgttccgtcgtcccgctcccatccgtcgctgcggccttggtgcgcgacccggccctcatcagaccgagaagcgggatgatcgccaatacgtagaacaccgtcgcgcccagccagatcagctgggagtcaagcaggaacagcacggcaccgaccgcaccgccgcatatcgtgcacacagcgatcatcgccgacagtcttgacaccaaggtcttcatacccagcgagggatcgtgcttgcgggcgtattcgatgtacagcgaggacgccgcgccgctttcgaccgcggccccgatgccggccagcacgttggccaggcacagcacggcgaagttcgcggaccagaacagcatcaatatgaatcccgcgacgcggcacaacacgccgatgatcagcgtccgttcccgggaccaccggtcgaacagcacggacgtgggcagctcgctggccgattcgctgacgtcgaacaccacattgacgatggagatcagcagcaccgacaggcccacatcatgataggccaccatatagtagaccgaaaaacatccggcaccaagataaataagcgcattatacaaacaggcaaaccgaaccatcaatcattcccttacataaacaaagaaccggtatacgtgggactgtctctcgaagtgtgtaactggccttaactggccggtcgtgtggccggtcggaaaggctggtggacgatgtctgctgggacaatgggaaacatgacaccgacgaagaagccggacgcggaaaaacgcaacgccgagcgggaggcagcgctcacattcgtgcgcatggccaaggaaaaaggactggacctgacagggcccgacggactgctcaaacagttcaccaaaagcgtgctggagacggccttggacgaggagatgaccgagcacctgggccgcgccaagcacaagaaatccaaggacggcagggccgcgaacacgcgcaacggcaccaccgccaagaccgtggtcaccgattcggtaggtccggtcgggatcgaggtgccgcgagaccgcgatggctcgttcgagccggtcgtcgtcaggaaacggcagcggcggctgcccggggtgggcgaggtggtgctgtccctgtatgccaggggcctgaccaccggcgagatcagcgcccacttccaggagatctacggggcggacgtgtccagggagaccgtcagtcgcatcaccgagcgggtcgtggccgagaaggacgaatggtgctcgcgtcccctggatcgtgtgtacgcggccgtgttcatcgacgcgaccgtcgtcaaggtgcgcgacgggcaggtcgccaaccgcgcgttctacgtggccgttggcgtggatctggagggcgaccgcgacgtgctgggcatctgggcgtcgcccgccgcggagggcgcgcgctattggctgtcggtgctcaccgagctgaagaaccggggcgtggacgatgtgttcttcctgatctgcgacgggctcaaaggcctgcccgacgcggtgggcgcggtatggcctctggccatcgtgcagacctgcgtggtgcatctgctgcgcaacacgttccgccacgcgtcgaagaaggactgggacgccatcaaacgcgatgtcaaacccatctacaccgcggcggcggcccgcgacgcgatgctggacaagtgggaggcgagatatcccgcgatccgcaggctgtggatggacgcgtgggaacggttcataccgttcctggactatgacgtggagatccggcgcgtgatctgcacgaccaacgccatcgaatcgctcaacgcgagattcaagcgctccatccgcgcccgcggccacttccccgacgagcaggccgcgctcaagtgcatgtacctgaccgtccgctcgctggaccccaccggcaagggacggatacgatggagcgcgcgctggaagcccgcgctcaacgcctttgccatcaccttcgccgaccgctggccaagcgagggaacacaacaatgaaaacgccagttacacacttaacgagacaggcccgcgtctgggccggtggccggcgatccgctggtgccgctggtgccggtactggttgaagtcgatcccgatggatctttttgcgtcgagccggtgccggtgccgttcgaaccggtctggctgccgccgacgccttggctggtcgggtcttcggtggtcggattctttgaggtgccggtgccgttcgaaccgttggcggtgccgtcggttttcgaatccgaggcgccggcgccggtcgaacccgaggtgccgttggcgtcgaggtcggtggagggggcgtcggttttcgaatccttgctggttcccttcgaatcatcgccggtgcccgtctggggcagagcgttgttctgatcgggggtgcccgttcgcgtgccggtgtcgttgcgcgcgggcgtggtcgtggtgggggatacgagattgtccgtgccgcgtccctgcgtggccagcatcacgacgccggccgtcaccgccacggcgagcaggccggacaccaaggtgacgatcatggcggtgtgcttcgaagcgcggaagcgggacttgcgcagctcatcgaccgagtacgtcctgccgttcgcccggctgaacacgatttcacgcggtctgcgtgtggaggaagcatcatcggcggtcacgcccgtcgccgtatcgggctcgtcccgaacgtcggtccggctgccggccgttcggggggtgccgccatcggcatcgccgttctcggcgtccttcgtgatcccgctgccggaggacgaggccgattggagtttttcgccggaggcggtgagcacgttctggtagatcttggtggccacggcggagacgacgtaactggccgccgctccgatcaccgaaccgccgatgccgatcttcgatgcgagcaggaacgaggtgacggcggcaagggtgcccgccacgatggatgagagggagattccttcaaaaaacttcttcacaatgcacgaccgtagggtgtcgggctgacaggttgcctgagactcgatggaagcggggcgaggcctacacgagaccttcaaaatcggccttcgtacaggtccgacacgccctgcggcgcacacacgtgcgtttcgcgtcgccgcaggccgcgggacatcgtcaattacgatgcagcgactgcccggtcggtctgatcaccgacatcagtacggcggcgaaaatcaaagcgaaacccaccagcgaagtccacatgattgtctcgccccagaacagcgcggagaacgtgacggcgaacagactttccgtacacatgatgattgacgcctgcgaggcaggcacgtgagccagaccgatgttctgcatgatctgggcactcatcgtggcgccgaggaacagatagagcacgctggccactactgagggtgccagccagctggcgttcggcatgggttcggtgaacaacgcgccgatgatgaacaatacgccggcaacgccgaactgcacaaaagtgacggcgatagggtcgaagcgtttggtgtagacaccaaggcaggtcagattgaacgagaagatgacggcggttgcgatggtcagccagtcgccggcgc

SEQ ID NO: 3042 - DNA, 12603 bp, Unknown
  R19_24m  MAG No. k141_21038
cgaatatgagatgaacggcgtgctgcaccgcccggacggctcccacagccacgacggcggccgcacctggcacacccactgatagccccatgaacatcaacgaaaccgaatcgcgacgtctggccatgctgcaggtgtgcgacagcgtcttccccgtgggcgcgttcgcgctgtccaacggcatggagaccttcgtacagcgcgacttcttgcgccgtggcgccgatttcgaggagtatatgaagaactacctcgaagtcgcaccgtacaaggaaatcgggcagatggtgctggccggcaagtacgccaccgattcgcgagtctcccgcaaagggctggccgagcgactcatcgaacttgacgagctggcctcggccctgcaatccgcacgtgaaatccgtgagggcagcgagcgcatgtgtacccgcctggtcaagctggccgagcagatggatgccggccaggcgcagacctcggatgggcatcgtgggttcgccaagccaagtcctgccgacaatgccaccgcatccgctgcggattcgcgcgaaaacagcatcatcgccgtgcacgagcatcacaccgaacgccaccagctgcacgatgccgccgacggcctgtacggctcgccgtcgctcgacctgtatgccgggctgattcgcgagcgccgctgccgtggcctgcattcgatcgcgatgggcctgtacgcggctgaccatgcgaacgacgtgcgcgacgcggccatcatgtatggatattcgctgttgagcgcgcttaccatgtgcgccgcgaaggcgattccgctcagccagtacgctggccaagtcgccctgcatgattcgttcccgcgcctcgtgcgcgcggtgaatatcgcgatgacgttgaagcccgaggatctcggcatctccggagcttacctcgacatcgccgccatgcagcatgaaatcttgtactcgaggctctacatgagctaattatcctggctcccatcaaggaggggagccaggataacctcacccgcaaaccacatacctaactaattcccacataaaggagaaaccccatgtcatacgtacgcatcggcgtcgccggaccggtcggttccggcaaaaccgcgcttatcgaacgcctgacccgcaagatggctgacgaatacagcatctgcgtggtcaccaatgatatctacaccaaggaagacgccgagttccttatcgagcactcacgcctcgcgccggaccgtatcgtcggcgtggagaccggtggctgcccccacaccgccatccgcgaggactgctcgatgaacctcgaggcctgtgaggaaatggcccgcacccacccggacgtgcagatcatgttcgtggagtccggcggcgacaatctgtccgccacgttcagcccggacctggccgacgccacaatctacgtcatcgccaccgatgagggcgacaagatcccacgcaagggcggccccggcgtcacccgctccgacctgctggtgatcaacaaggccgacctggccccgttggttcacgccgatctagacgtgatggcccgcgactccaagaagatgcgcggcgaccgcccgttcatcttcaccgacctgatgggcggtgccggagtggacgacgtcatcgcatggatcaagaagagcgtgctgttcgaggacatgtgatgttttggcccgcccgtatccaaaaacggacgggccgaaacataccgttgcaccaagtgcggcataattgcccatgtcatcgtcaggcaccaatcataagaaggcagcgattcgtccatgggcagtagcacttttcgtctatccactgcattccgccacggacgtaccaaaatcgacgatatttatttcgaggcgccgttcaaactgatgaccccgttcaccaacggacgtcattcggatttcgtcgtgatgctcgcctcccctggcttcctgaggggcgatgaagcccatatcgatatcgacttcggcccaggcaccgattcgaccatcaaaacgcaaagctacgagaaggtgttcgacaccgcggacggctcggccgaacgcaccatcgaactcagggcgcgtggcaatgccaaagccgtgttcctgccgttcccagtgattccgttcaagaacagctcattcatgaacctgaccaccgcgcatatttccgccgagtcagcattcgtgtatgcggatgtggcgacatgtggccgcgttgggatggatgagcgttgggccatgaaacgttttacgaatcgtatgcgcgtatatgtggccgaacccgaagccgtgaccaaggccgccgcagccgaattggcgcaacagcacgcacatcgccgaggccggccttccaaggcggaagccgccgctgcccaaccgcgcgaacatctggcctttgctgaccgcatgctgttggaacctgatgcttttgactacaccgaactcggcatgtggcgcgaattcacccactgcggcgttctctacgctcacctgcccgaactcgaccctagcgacgctgtacaagatgccgcaactaaagaagcatcctccgccgccatccgcgagcgcatcgagactgcccgcatcgccgccgaagacgcgctcatcactcgcatccatgaacacgcagacgccatcggcttcaccggcgagctcggcgtgagccgcgtaatcaatggcatctgcttgcgtgtactgaccacccgaggcgacgacgccttcgacctcattcgagatgtggccgatttcgtgaccgatttcgtggccgaaggctaaaaccaagtggctctcccctttgaggagagccaccagttctctcagaacaggaagtaccgctgggtaagcggcaactcgtacgccgggtcagagtggaccggttcgccgtccaccgtcacttggaaggtttcgggattgacctgaatgtcggcgagcacgtcgttgaacttcagatccttcttgcctaccgtgcggcagccatgcactggtaacacctggcgctgcagctccagcttgcccttgatatcgtcatccacggcggcctgcgaaacaaacgtggcgcaggacttgccaagcgcacggccgagcgcgccgaacatatcgcggtagtagacaggttccggggtcgggatagaagcattcgcgtcacccatacgagagtaggcgatggagccacccttgatgaccatttccggcttcgcgccgaacatggacggctgccaaagcacgagatccgccatcttaccgacttcgatggagcccacgtattcggaaatgccgtgggtgatggccgggttgatggtgaacttggagacgtagcgcttgacacggaagttgtcgttgcggttgttgtcgtgttcgtcttcggggagcggaccgcgctgcttcttcattttgtcggcggtctggatggtgcgggtgatgacctcgcccacgcggcccatggcctgcgagtcggagctcatcatggagatgatgcccatgtcgtgtagcacgtcttcggcaccgatggtctcggggcggatgcgcgagtcggcgaaagagatgtcttcgggcacattgcggtcgaggtggtggcagaccatcatcatgtcgagatgctcgtcgatggtgttgcgcgtgaacggcatggtcgggttcgtggaactcggcagcacgtttgggaagccagcggcacgaatgatgtccggagcgtggccgcctccagcgccttcggtgtggtaggtgtggatggtgcggcccttgaacgcggcgatggtgtcttccacacaaccgccttcgttcagagtatcggtgtggatagccacctgcgtgtcggtttcgtcggccacgccgagtgcagtgtcgatgacggccggggtggcaccccagtcctcgtggatcttcaggcctgcggcaccggcgcgaatctgctcacgcaacggttcggggctggagtcgttgcccttgccaaggtaggcgatgttgatgggcagcgcttcggcggcctcgatcatgcgggtcaggtggaaggctcccgggttgcaggtggtggcgttggtgccgtcggccggaccggtgccgccgccgaccatcgtggtcacgccaccggcgagggcagtgcgaatctgctgcggggagatgaagtggatgtgggtgtcgagtccgcctgcggtgacgatgaggccttcgccggcgagagcttcagtgccggagcccgcttcgagaccgggggtgatgccgctcatggtctgcgggctgccggccttgccgatggcgctgattttgccgtctttgatgccgatgtccgccttgtagatgccggtgtagtccacgatgagggcgttggtgatgatggtatccggcgattcaacgtcgagctgcacggagctttggcccatgccgtcgcggaatgatttgcctccaccgaacttcagttcatcaccgtagtgcgtgtagtccttttccacctcgatgatgaggttcgtgtcaccgagtcgcacgcggtctcccgtggtcggcccgaacattcccgcataatccttgcgcgtaataatcttcatgtcaaaagtccttgctgtttttcagctccccttgtcaggggagctggctcgcgaagcgagactgagaggtagtccgctccccgctggcgggagctgtcagcgaagctgactgagggtggcccttagctcagattcccgagaatccaagctcatgcgccttcttaaacgcggcctcccgcacctcagggtcatccaacttcccctcaaccagtgcgctgaagccgtgaatctcacgcgtgccaccaatatcaatcaaccgcactcgatgcgtttcacccggctcgaacctcacagccgtaccagccgcgatatccaaccgcttgccatacgccgccttacggtcgaacttcaggtacttattaacttcaaagaagtggaagtgcgaaccaatctgaatcggtcgatccgcagtgttcaccacgtccagctcgatgtcttcggaaccttcattgagttccaaatcatcgtcagccagcagatattcccccggcaccaacttctcggtggattcgatggggttatgaatagagacgagcttggtgccgtccgggaacgtggcctcgacctccaccacttccagcatctcggccacgccatccatcacatcttcaggcttgagcagcgtgcgaccgtatgccatgagctccgccacagtgcttccctcacgcgcccgctcaacgcattcggcggaaatcaacgcaatcgcctccacatagttgagcttcacgcctctggctttgcggtctttggcaagctgccccgccaagtacagcatcaacttgtcagtctctcgtggtgtaagtctcataacatcctctgttgttgactggagtttttcaggcacaccaatgtgagccctaacatcgcccaataataagagcgttataagaacgggacgtttctcataacgctctatggccataaacgggggtcgaatcaatcacactctcatggattccttggcggcttctacttggtcggggccgccttcgccggtggcgatgaaacggccggaggccaggacgtagtagcggtcggcgcgctcgacggcgaattggaccttctgctcaaccaagaccacaccgatacccttgtcttcggccatcatgcgaatggccttctggatttcggcgacgatattgggctggatgccttcggtcggctcatcgagaatcatgagcttggggcgggtgatcagcgcgcgggcaatcgaaagctgctgacgctggccaccggacagcagaccggcacgtcggccagcaaattccttcaagaccgggaacatttccacggcttcgtcgtaacgggccttggcctctgaaccgtagcggtcggcgaccacgtgcaggttttcgtccacggtcatggtgccaaaggactgctggccctgcggcacgaacgccatgcccttgcggatgcgttggttcggtgcagccttggtaatgtccttgccctcgaaactaatcgaaccggacgaaacgggcagcaagcccagaatcgccttcaacagcgtggtcttaccggcaccgttgttgccgacgatgctcacccattcgccggcggccacgtcgaaactgatgtcgttgacgacggtcactttgccgtaaccggtgttcaaatcctttacttcaagcattgccatgattattcactttctacggcgtcgtgcatattgatgttgaggcgcgttgtatcaccctcaatatgcactgaaaaagcgcattccgggatgcgatggttgttgtcagtgcggtccatattgcgcttcttcctcttacctactcccctcagtcaccttcggtgacagctcgtccgcaattaaggacgggccttgcctgcaacctgctggttcgactatcgtctcgccttcggctacaaacagcccactgggctgtttgcttaacgcctcggcctcagggaggggagacagggagttagttttctccgccgcccaggtagatgcggactacttcttcgttgttttggatgtcttcgaccgaaccctcggcaaggatttcgccctggttgagcaccgtgaccgaatcggcgaactgacgcatgaaatccatgtcgtgttccacgatgatgaccgtgcggttcttgctgcatcgcttgagcagctcaccggtctgcacacgctcggccggagtcatgccggccaccggctcgtcgagcagcagcaggtgcgcgtcctgcacgagcagcataccgatttccagccactgtttcttgccgtgcggcaggatgcctgcgggcttgtttgcatccacagtcagattgcacacgtccatcatgtattcgatgttctgcgaaacgccgcccatcggctggaacagctcacgacccttcttgcggaagccctcggccagctgcagattctccaacacggacagctcttcaaccaccgatgcggtctggaaggtacgcccgacgcccagcttgacgatgtcgttcggcttgcggcccaacagctgctcgccacggaattccgcggaaccagtggccggcaccagtccggtaatcgcgtcgatgatggtcgttttaccagcaccgttcgggccgatcaggaatcgcaaatcgccgtgctgcacagtcaaatcaagattcttgacggccacgaatccatcgaactcaacgtgcagtccacgaacttccagataatcgctccactggccgccgcgatcatccagcaccgcaagctgatcgtgcagcttcgtacgctcttcaacgatttcggccttcatctgggccgcttcgtcgcgcatacgcttggcttcgtcgcgcatctcaatcatttcggcgcgcaactgctccaaatcggcctgcgatgcaggtgcgggagccgatggattcgagctcatgttcttctcctcactcatgcgttcaccgcctttgcagtagcagtaccggtaccggcaacggcaccagcaccagcaccagccgaagctccaaccgaactctttccgagcccgatcttctccttaatccaaggccatacgcccttgaactgtcccaagcccttcggcacaaaggcaatcaccagaatgaagatcaggccttcgatgtacgtccacgcggacggatacgcctcagacagctgcgtttccgcaaagcgcaccagcagcgtgccgaccaccgggccgagcaaagtggcacgtccgccgatcaccacgccggcgagcatcaggatggacggcgtcacgccgatatcggacggcgaaatgatgccgaccactggcacgaacattgcgccaccaatgccggcgaacattgcagccaccgagaaggcgaacaccttgatggaggcggggttatagcccaagaacttcatgcggttctcttggtcgcgcacgccgataatcaggtcgcccataaacgatttgcgaatccagtagacgataagcaccatggccagcgtcaggaacgcgcagatgtagaagatcatctgcttgttggcgttatcagtcaagtcgtaaccaaagaatcccttgaaatcgttgagaccgttggtgccaccggtggttttcgactggccgataagcagcacggcgaacgcggcaaccagcgcctgcgaaagaattgcgaagtaggcgccacgcacgccacggccgaacacagccagaccgaggattgcggcgataatgcccggtaccgcagccacgccaatcacggcgatgaccggattgcggaagagttcccagaatccaggaaccttggtgatgccgtactgggacatgaagtccggcacttggcccacgccaatgtcctcaagcttcatgtggatagccatcacgtacgcgccgagaccaaagaacaggccttggcccagcgtcagcataccgccttggccccaagccaggccgatgccgaccgcgaccatcgcgtagcacaggtatttggacagcaggccgaggttgtacacgctcagcacagtcggagaaaggaagatcagcgccacggcaatgaccacaccgatcaaagccttatatttcgtggcgtattcgctcaaagtcatcttcattgtcgtttccttacccttctgaagcactcacgcgaggttcctggagcggatggagaccaagccctgcggcctgaactgcaggaacaccaccacaatcaggaacacggcaacctgaccaatcgaggcagaggtcggcagttcgatggacgactggcacaagcccagcacgaacgaggcgataaccgcgcccttgagctggccaacgccgccggccacaacaaccaggaaggcctgcacgatgaaggtcgtaccgaagttgaagctaatcgagttcagcaggctcagcgccacgccagcgataccggcgatgccggagcccaggaagaacgtcacatggtcgaccatcttggtggagatgccggaaacctcagcgaggtcgcggttctcggaagtggcgcgaatctggcgacccagcggcgtgagcttcaggatcgcgtacagcgcagccacgcagataatcgacagaataaagatgaacagtcggcctgcagagaagctgtagccaaagatggtcaccggattggtcagcgcttcaggagccgaagcgtagaccggagtggcaccgaaaatatcgcgtgcgagctgctgcaataccagcgatacaccgaaggtaaccagcagcgtatcaagcggacgattgcgcatacgctccagcagcaacacgtccagcagtaaaccaagcaaaccggctactacgaaaccgaccaccagcgccacggccagggacactgttttattgccgatgaccatgctcatgacgtatgcggtgtatgcgccggccatcatgaattcgccgtgggcgttgttgataacgcccatctggccgaaggtcaacgacaacccgagggctgcgagcagcagaatcgatccgttggacagacctgccacaatttgtggaaataacatacccatgttgttgtgtcctcttctctcagttgctctcgacgctggcgctcaggctcttggcccagctgtaggtcttcaggtacgggtccggcttgatgggaccgtccgacttccagacggtgtggatgagcttgtctgagccgatcttgccgatgtatgaggtcttgtagatgtggtggttttcgccgtccaccttgaccttgccttccggtgcattgaaggtgacaccgtctgctgcagccttgaccttgtccacatcgaacgacttggccttctcgaccatgcccttccacaggtacacagatgtgtacgccgattccatcgggtcggaggtggggcgattggctccgtagcgcgccttgaagttcttcacgaacgtcttgttttgcgcattgttcagcgtctggtagtagttccaagcagtgagctggtccttgacgttgtcaacgccgatagcggaaacctcttcctcggcgatagacatggaaatcaccggcgtggtggcggctttcaggccggaagccttgtattccttgaagaatgcgacgttggaatcaccgttcagcgtgttcaccaccgcatccgcgccggagaacttgagcttgttgacgatggtggtgaagtcggtggagcccattggggtatattcctcgccgaccacttccatgccattgccctcggcgtacgccttgaccacgcgatttgcggtctgcgggaacacataatcggagccaaccaagaacagcttcttgtagccttgctccttaaggtaatcaagcgcaggcacaatctgctggttcggtgcagcacccgagtagaagatgttcgggctggcttccatgccctcgtattgcagcgggtagaacagcagcgcgttatccgcctcgaacacaggcagcatggccttacgcgaagaggacgtccagccgccgaacaccgcggccacgcattccttttcgatgagggtcttggctttttcggcgaacacagccggctcggacttgccgtcctgctgcactaccttgagctgcttgcccagcacgccgccctttgcgttaatctcatcaacggccatgtgcagcgaatcactcaccgtctgttcggaaatggccatcgtgccagacagcgaattcacgaaaccgattttgatggtgttgcctgaggtgtccacacatgatgaggtgtcgcttgccgcagtcgcgttgttctcttgggcctctttctcggccacggtgcgaccccagccacaaccgctggtggcaagcactgcggcaacaatgcacaccgcagcacccatcttcagtctttgcaatcgagtcatatgactcttcctccccacatacgactacattccgcgaacgttgcccgcccgcggaatgtctacgctgattgccgtaccgtgccctgatgcctgatatcgtgctgaaccacttgccgtatatcgacggctggcttccggccgactgcactatacgatggcagtgcctgcgtgaatttccgttgcctgaatatttcatatgcgtctcatacataacgctcacgttacaaaatcaacggtgttacgcggcccgccgtcgaacgctgtttacattggtgtgcgatacgcgcgcgactgccgcccaagtgacttccccgcgaactacgggtaggctggggagtatggaacttcacgttttgaatcatccgctggtcgagcacaagctcaccgtgctgcgcgacaagaacactccttcctccactttccgcgagctcgtctcggagcttgtgatgctcgaggcctatgaggccacccgcaacctgtccgtagttgccgcaccaatcgaaacaccggtcgctccgatgaccggtaagaagctggccaaaccgcgtccgatcattgtgccggtgctgcgtgcaggtctgggtatgctcgacggcatgacccgtcttatgccgaccgccgaagtcggcttccttggtatgaagcgcgacgaggaacaccccactcagcaggtcacctatgcgaaccgtctaccggaggatctgtccggtcgtcagtgcttcctgatcgacccgatgctcgccaccggtggcacgctggttgctgccacgcattatctggccgagcgcggtgccaaggacgtgaccgcgatcaacatcatcgcggcgcctgaaggcatcaagttcgtggaagagcacatcgatccgtccatcgacttcaaggtcgtagtgtgcgcggtcgacgagaagctcaacgacaagtgctacatcgtgccggggttgggcgatgccggcgaccgtctctatggcgtaattgactgattttcctggctcccctcagagaggggagccaatgtgatgggctttttatgcaaatcgacattattgcgccgggacgcgtgaaggaacgatatcttcgcgacgccatcgacgagtattccaagcgactttcgcgctactgcaggctcaacatcattgaagtggcagatgagaaaacgcctgaccacgcctccgaaggcgttgaccgacagatcaaggccaaagaaggcgaacgcatcgccaagcatctgaaggacggcgcgtttgttattgcccttgccatcaatggcaagcagctgtccagcgaagaattggccgccaaaatcaacgaccttggattgcgtggcaccagccatattcagctggtcatcggcggctcaatcggccttgacgacgcgattctgcgtcgtgctgattttctgctgagtttctcgaagatgacgttcccgcatcagctcatgcgcgtgattctgctggagcagatttatcgcgcttataagatcaacgctggcgagccatatcacaagtaaaacgccatacctcatggggcgggaaatcccccatggggcggtaattgccccatggggcggtaaaaccctcatggggcggtatgccaaaatggcttaattccgcggtttcacatattcttcaaaccgccccatgggcaagttaccgcccgatgagcctgtaaccgccccatgagcacatcaataacgccctcaacctcacactgcgtcggggacgaacgcttcgaagatgtggcggtcgaagtagggcgcgcactgggcgagttcatcgctgctgcgcacggtccatgaaaccggcatcgcacccatcgaacgagcgag

SEQ ID NO: 3043 - DNA, 24812 bp, Unknown
  R19_24m  MAG No. k141_21710
cccgaggcccctgcccgcgcgctgatcttcgactccgtctacgatccctaccgcggcatcgtcacctacatccgtatggaggacggcgaactgcacgaccgcgaaaaggtccacatgatgggcattggcatgacccacgatcccatcgagatcggtgtgatcagccccgatatgacccgtaccaaggcactcggtgccggtgaggtcggctacatcatcaccggtgcgaaagatgtgagtcagtccaaggtgggcgacaccctgacctcggccgtccgcccggccaccgagccgctgcccggctaccgcgaccccaagccgatggtctacgccggtttgttcccgatcgacaacgcgcaattccccgaactgcgtgatgcactcgacaagctcaagctcaacgacgccgccctgatctacacgccggaaacctccgtggccttgggcttcggcttccgctgcggcttcctgggtctgctgcacatggagatcgtcaacgagcgactctcccgcgagttcggcctcgacctgatccagaccgccccgaacgtcacctacgacgtgaccgccgaggatggcagtcagcatcatgtgaccaacccgagcgaattcccggacggcaagatcaagaagatcgtcgagccgatggttgccgccgacatcatcacacccaaggaatttatcggtgcggtgatggatctgtgccaggaccaccgcggcattatgggcacgatggagtacatctccaccgatcgtgtcgagatgcactaccgcattccactggccgaaatcgtgttcgacttcttcgaccagctcaagtcccgcaccaagggctacgcttccctcgattaccatgaggatggcgagcagtccgccgatttggtcaaggtggacatccttattcagggcgagaaggtcgatgcgttcagtgccatcgttcaccgcgataaggcgtattcgtacggtgtgatgatgaccaagaaattgcgtagtctgattcctcgccaacagtttgagattccgattcaggccgcaatcggttcgcgtatcatcgcgcgtgagaacattcgtgcgttgcgcaaggacgtgctcgccaagtgctatggcggcgacatcacccgtaagcgtaagctgctcgaaaagcagaaggccggcaagaagcgtatgaagatgctcggccatgtggaggtaccgcaggaggcgttcatcgccgccctgtccaccggcgaggactccaacgaccgcgacaccaaagacaagatccgcgccgctcagaagaccgagggctagtgttcgaggtctacatccacgtcccgttctgcttgcggcgctgcggttactgcgacttcaacacctacacggctacggatcttggtgcgggggcctcgcgcggcaactatgccaatatggtcattcgtgaaatggccctgaccaagcagtggcagctcgaccacggcatcgaggagccaccggtctccaccgtgttcttcgggggtggtacacccacgattctcgccgcccgcgatctggtcgccatgctcgatgccatccgcaagatctggagcatcgcgcccgacgccgaaatcaccaccgaagccaacccggacacggtcaacgaatattacatcaatgagctcgctgccggcggcttcacccgcgtttccttcggcatgcaatctgccgtgccgcacgtgctcaaaaccctcgaccgcacgcatacgccggccaacgtggccgcaggcgttaatgccgccaataaggccggcctgcgctccagcgtggatctgatttacggcgcaccgggggagagccttgacgattggcgcacctcggtcacgaccgccatcgacctcggcgtgaaccacatctccgcctacgcactgaccgtggaacccaccacgaaaatgggtcgtcaaatcgcggccggcactctgcccaaacccaatgacgatgacgaagcagccaaatacgaaatcgccgacgacctgttcgccgccgccggcctcgaatggtatgaggtctccaactgggcccgccccggatacgagagccagcacaacctcggctattggcgcaacgtcgattgggccggtctagggccaggcgcccactcccactacaacgcggtgaccgaggctgaccacccccagtcggcttcgctgacagcccccgccagcgggggcaagtccgaagccattgcctctgcctcagctgatggacaggccaacgccgaacttggagaaaccaacgccgaactaggtatgatcaacgcgcatgggaacaactcccaagaaattcatgcccccgctggcgggggctgtccggcggatgccggactgggggtggtttctgtctcacacggtctgcgcagctgggacatcgcgcacccgcgtttgtggggcacggccatcaacgagaaccgtgtgccgtgggccgatagcgagacgatcactcccgaggaaaacctcgaagagctcatcatgctcgggctgcgcctgcacgagggccttggcctcgaccgcatcaaccgcgccatcaacgatgcaggtatgagcagcacgccccagactctccgaaccgtttcggttgaccaactcgcccccatgatcagcgaaggcctgattaccgtatccgataatcatcgagtggtgcccactcgtcgtggccggttgctcaatgactcggtaatcgaacagttcttcgattacgtcggtgtatgagtcggtggtatggtgcgcggcagtcgccattacccgttcgctagttgtggttacaccgtcagagggagcttttttgttttaccggcgggggagggaaccgcgtaggactacgtccggggcgctttgcacgtagatcaggcggttggcagtgccgccggtggcctccgcgtcatcgcggttggacaggatgctgtccacggcggcctggcccatttcggccagcggcaggtgcacggtggtcagtggtgggaacacgtcggcggagtaggggatgtcgccgaaaccggtgacgccgatttcctgacccggctcgatgccgttggtgcgcaacgcggtcatcgcaccgatggccatcacgtcgttgagcgcgatgattgaatcgatgcctttgccgtcgtacagtgcgccttcgcccggcttcagcagtccggatcgggccatttgcatgacggccgcatagccgtcggtgcggctgaacttaccgtttgccacggctttcgggtccacggtgatgcctgtctcgtccaacacttccatcacaccggccagtcgttctttggaggagcggtgtgcgtcatcgcccttgagaatcgcagggcgcgtatacccggaatcgacgataagctttgcgatggcacgcgcgccgacgtcgttcgccacgtccacggccgggaagggcaggttgcggttgagtacgaacacggcatgtccgccggacgattcgtactggatgagttccgtctgcaacgcctggcgttccggcgcgtcggtgtattcgctttcggagatgatgatgccgcgcggcctggtggatacggacttacgcaccgcctccaactcctcgtgcggggtggctgccacgccgatggtcacggagatgccgcgttcggccgccgccttgaccacgccttgcgacacggatgcgaagtagggatcggagatatcggagaccagcagcacgatgttcggtgcagtgcctttggccactgcctgagcataggcgttgggacgatagttgagcttggtggctgcttccatcaccttgacatacgattggttgcgtaccttgcgggtgctgccgttgagcacacgggatgcggtggcgatggagacctgggcttctttggcgacgtccatcaatgtcgctggcgattgcgccttatcgttctgtacagccacgatcgaatcggtccttttcttccctgaaacggaaaacatgtctaaacgcttaccgcaatgatatcgcagttttgcttgcaatagtagcattgtggattggaaagcctgaattttgaacaaaaataatcacgcgaattatggaaagcgcttaccgttccgcgtgtcgtgcggtatgctcgaagcgtgacgcgatacttatgtgcccctgactccttcaaagagagcctgaccgccatggaggcggcccgggcgatggctcaggggattgagaatgccgaccacgatgccgaggtccgttgcctccccatggccgacggcggtgaaggcaccgcacgtgcgcttgtcgacgccactggcggatcgatgcacgccgtgccggtccacgacccgctcggccgacctgtcgaaggccacttcggcctgctcgccgacggcacgaccgccgtggtcgagacagccgaagccagcggcctcgcactgcttgaagccaaaaaacgcaacccgttgattgcctcctcctacggcaccggcgaactcatactcgccgccgtccgttccggagccaagcgcatcatcgtcgggctcggcggcagcgccaccaacgacgccggtgccggacttctgcaggccctcggcgttcgtcttctggacgggaacggcaacgaccttaagcacgggggagcggccctcgctgatctggccaccatcgacatcagcacgatggacccggctctcaagaacgtctccatcaccgccgcctgcgacgtgaccaacccgctgaccggtcccaccggcgccagcgccgtgttcggaccgcagaaaggtgcctcccaggccgacgtcgccacactggacgccgcgttggcgcacttcgcgcaggtcatcgaaagccggctcggcgtcgctgtgaacgacgtgccgggcgcgggcgccgccggcggtatcggcgccgcgctgaaaggcttccttgacgccgaattccgtccgggcatcgccatcgtcatcgaacaatccggacttgatgcggccgcgcaatgggctgacgtggtgttcaccggcgaaggctccatcgacttccagaccaagttcggcaaaaccccggccggcgtggccgaaaccgccaagcgccacggcaagcccgtgatcgccgtcgccggacacatcggcacgggcatcgacgaactgcatgaggtcggcatcgacgcggtattcggcatcgcccccggtgccgccagcctcagcgaactgctggccgacgcggccgccaacgtgacccgcaccaccgaacaagtcgtacgaaccctacaactgaagcagcttcacaagctccctctgatgggccgagccgtgaaggaaacgccggaggcgtttccaggcgagggcttgacgacagtcaacccagccgaaggctccataattgcgggacgagctgccgcggcaaagccgtgactgagggggagacttgtggcgcagccgcaaaaaatggcatcggctttcagccgatacagtcattcgtctgcttctctccctcagtcagctgcgctgacagctccctcgtcagagggagccacacaattcggaaaggaagatatgcgcaccatgctgtacaccaaggtgaccagcatgctgagcaccacgggcatcgccagcgagaaatacgccttcggaattggcgccttttcgaagagttcgttatccatttccgtcccttggtgttttcgttcttcagtcactgcgcgggatgccgttcggcgtgcatcacaggcattgtagaggcaacagtgtggacaacgggcggggggagtatctcatgatgcggtgagggcgttgatgatgacgcatcgtgtattggtggccgtgtgcatcgtatgtgaacctgtgctggcacggcgtacacacgatgggaaaagaaagaatatatggaccccgttgtcccggttattgttcagttattactgtgttgaattattgcgttattcaattattgtggtgtgccggccgattgcggcctgcgggggattgccttcgtatgtgtcgtgcaatctcatgaatgggatcgttcgctagattcagcgagcgtccttgttggcggcgttgatgatgtcggcgaacatcttggagtcggcgtagccggcgcgggcgatggcgtccataccggagagggtgaaaccgcgaatcatggaatccatgaatgacataatgtgttccttgtcttgacttgcaaagccgtgggctttgcgatgtgttgttgtttacgttatgagacgggccgtgtgtgagcggcgagtcagggaagaggctcagcgagcgttcttatcggtgtcgttgatgatgtcgagaatcatctgggagttggcgtgaccggactgggccagggaagtggcaccgtacatagccagaccgcgaatcatggaatccttgagagacatcatgtttcctttcgttggtcaaaaccttgtggctttgagttttgtttatcggtttctttctgaaaccggtttcagaataacgcagtccgatgacaaacgcaaggggactattccgctctcggcgtttctggcggaatatcgccgttctatagataccgttcggtagttaagaggctgtctagtcgactttctgacggtcttgttctgggcgcatggttttcacgaaatggcctcatgtcgcggaaatcgtacgctgagtcgtcgtaagcgtacggtcttcacgaaatggggtctcatctcgtgaagaacgtacactgagtcgttctgggcgtacggttttcacgaaatggggcctatcttcaccggattttgggcacaccggccttgagcagcttggtctcaagattgatggggcgtagcagatcctcatagaacacatggacgatttcggtgacgccctgttcccggagatgccgatcacgtctgcggtcgtactccattttcgcctggaggcttgcgcgattcttgttgctggtgtcggcgtatttggccatgccgtcgtattctgccacgatgatgcggccgtctgcgagcttccaacagaaatcgacgcgatatggcattgcgggattgtcgggattcatgaactgcacctgcagcaggggaatgccgaaagacaattcggtgatctggccacgcatcaatgattcgccgccgttttcgctcaggggatccgcgtacttcagcagcttggtcacggagacctcgtcgcagacgctttgaatcatcagcgactgcacctcttcgatggtcgtcagggactttctcagagccgaatcgtatatgggcagcgcctgtgggaatgggaatgccgcgcagtcgagcagcgttcgcgccggagtcgtcaagagaatgccattatgcttccgcgtcggaatccgattgatatagatgcggttgagacgcgcctcgtctccgccgccgatgccggacttcgaggcgatgtgcactgtgccgtcgtgcagggaatagttgtgctgcagtccgtatacgcacgccgcactcaaccccgcaaatacccactgagggtggattgcggatagcgcacgtatgacctgcaatgactgttgctctctggtcatggtgttccaaagtattcggtcggcgtacaggttcttatacggtgacaccagctccccggcatgcaggcgacgtttcagggcgcgccgttgcgcatcactggtgccatagcagcagcgacgctcctgcttcgcctgctgcagcagtgcagaaacttccttgtgttctttcatatctcgacgctaagggtgattttgattgttgcacaagctcaaccggcaaatgtgaatactatgtcacgcgaattgttggtgtggataacttgaatcgacgtcgacggctttgccgacggtcttgtcggaggcgatattagcctaggacaccttgctgcgccgccttccataccgagaacagtcatcagtgacaccgagggcatcttcaacgtatgttcttcacgaaatcagctgccatttcgtgaaaaccgtacgctcagaatgactcagtgtacgttcttcacgagatgaggccccatttcgtgaaaaccgtacgttgacgacgattcagtgtacgttcttcacgaaattagggatgatttcgcggaaaccgtacactcaccgcaactcagcgtacggttttcgcgaagttattgatttggatataggttccccgtcatgaactacaatgaatcgcggcgaaaaacggggaaccgaagtcggagcgcggctgaacggatatgggtgtgactggatgactgccatggtgatgccggttctccttgacgtacgcaataacaacaactgacaacaacaggggagacaaggatggcgagaagtgcgggccgcacccgaccggtgatcaaggacgtggccagactggccggagtctcggcaccgaccgtctcccggtatctcaacggcaccgtcaatgtcaccgaagacaagcgtgaacgcatcgccaaggccatcaaggagctgggctatgagccgagcattgtggcgcgcgccctgtcgaaccgggagatggactccgtggtggtgttcgcggccaatccttccgccttctccacgtccgaaacgaaccatggggtcgaggccgccgcccgtaaacgtcggttcctgctcaatatcgtttctttggatgagtccgacatggactccgtcaaggctcgtgtgcgcatgggtttgtcgatcaggccggcgggcgtgatcgtctacgagtacgaccgggccggcatcgccgcactggaatacattcccaaagatatgccgatggtcgtggtgggtggcagcttcggcgacggcgaataccagatcatcaacgccgaaagggatggtggccgttggatgaccatgcatctgctggatctcggccatcgcaccgtgttccatgtggggcgcccggaaggaccgaccgataacacccgcaccaatgggtggcgtgacgcgctcaaggagcgcggcgtcacggtacctgacccaatcatcgtgcccgacgatgatttggaggagtcggtcaaggctgggcgcaccttgggccgtcgtggtgatgtgactgcgattttcgccggcaacgacgagaccgccatcgctgtgatccgaggtctaagggaggttggtcgccgcgtgcctgctgacgtgagcgtcgtaggctttgacgaccgcaacttcggtgccatgtggaatccggcgctgaccagttacacccagaacttcctggacatgggggagcggtccttccggatgctgttcgaacagattcaggccaagcgtgccggcgatgacgcgccgccctcgcaggtcgaagtggtgcaaggcaagccgtgtctgcgtgcctccgaacgcgcgtacggcgacggcgaaatcgcgtagtcgatggggcgtgcgtatcaatcgatagtgactgtagcgcattcatatcgtgacgaggagtctcccatgccgaactgtaagcgcttaccttaaatagttcgtaatgtgatttacgtcatactaatagatgttctgaatcatagtgttctgcaaggattccttgcggaaaatggctatttatcaacagttttcgaaaagtccgcatgatgggcgactgtgagcacgctttatggtaatcgctttccgtagtgttattgttacagtgtgacttttgaacaatcggtaactctgaagactcagccccagacctcgggcactatctcagcggcagacgccgcgatgcaatcggcccgcgacgaacgcatccccggcaaactcatctgcgcgatcgtggcccattcttcggcatcctgaccgaaaccgtgatgaatgtgctgttcccgcagctgatgggcgtgttccacatcagcgaggccaccatccaatggctcaccaccggctatctgctggtcgtgtcgattactgtgccgctcagcgcatggctgcgccgtcgcttccgccagcgcagcatcttcctggcggcaacgcgatgttctccacgctgcagcagttcacgggtgcggccggcaccactgtggtgggctaccgtgatctccgtgttccagtccggctcgggcaaggtgggttccgccgactatgccgccgccaccgtgaccggcgcatagattgactacgcgatcatggctgtggtcatcgttatcgttatcgttatcgtgttcgtcgccatgctccacgccctgcgtaaccggaagtagatggtaagtcgagtggcaccatgctaccgcgcaatggctgggcatggagttttggctaggaatcgttcgacaggcgttggcgcggccgctgagagcattcgcgtcgaaaggtttgccggagctcgttcggcgtggaatgggccgattcaccggtgattgttggtcaaacagccaatgctgacccttctgccaatggttagcgaggttcctatcataagcatttcggagagcgatctcgaaaaaggcgacatccttcacgaggatttgaccaaggtcaacattccactcgtataaagtaaggctgtaagcgcatcttggtggcaagcgtcaaggtatgtacggaatcgcggggcggaaagccactcctcaatccactgcggattggtaataacggatgattgtaacgcatgaatcacgaggcccccttacctcgtattgcaatgccccggtgacatgaaaaacggcggtcaacacggggcttgtacattaaggatacaggaagggtagttataagttgctgatatgccgtgttttttacgatagtcatcggcctctcccatacggcggaacaggaactgacggatgccgagatgccgtgattcggcgggaggacctgtactggcccagtccttctgctcggtagcggtaccgctacgccgactcttcccgacgctccagtgccgccgatatcagtgaatgcccagcctgatgtcggtagagttaaggctattggcttggtctcgacggtgagacttctccaatggccaatatgcactgttgcaaaggagtatgcggtatgcaaccaatcaaagccattcaatacggctgcggcaaaatggcgaagtacacgattcgctatatgcacgagaaaggcattcaaatcgtcggtgccatcgacgtgaatccggaagtcgtgggcatggatgccggtgtgtttgcaggcatcggccccatcaatgtgccgattcgcgccgatgccgaggctgtactcaacgagtgcgacgcggatatcgcggtagtcacgctattcagcttcgagaacgaaatcgccaccatgtgcgagcagtgcttggcccgcggcatcagcgtgatcaccacctgcgaggaatgcatctacccgtggaccaccgatccggccaccacgaaccgtctcgacatcatcgccaaggaagccggtgccaccatggtcggctccggcatgcaggacatctactgggtgaacatggtctccaccgtcgccgccggatgccacagcatcaagaagatcaccggtgcggtgagctacaacgtcgaggattacggcctggctttggccaaagcgcacggctgcggtctgaccgccgaggagttcgaggccgagcttgcgcatcccgaaaccgtggtgccctcgtatgtatggaattccaatgaagcgctggcccagaagcttgggcttaccatcgcatcgcagacccaggccagtgtgccgtatttcagcgatgtcgacgtgtattccgagacgatggacgagacgattccggtcggcaaatgcatcggcatgtccgccgtggtaaccaccgaaacgaatcagggcatcacgttggaaactgcctgtatcggcaaggtgtacgggccggatgatggcgatatgtgcgattggaagatcgagggtgaaccggacgtggagttccacgtggtcaagccggcgaccgtcgaacatacgtgcgccacaatcgtcaaccgcattccggacgtgctcaacgcgccagccggatatgtgacggtcgatcagctcgatgaaatttcatatctcacgtatcccgccgcgctgtacgtggcatagacccatattttcagggatgaaggccggcactcataagggtgccggccggtatcaggcggccagagtcgacgtgcgtggcatcacctggaactggatatggtcatgggtgatgtcatcgggccgttcatgccgtaggttcgactcgatcagcgtcaccatgcgatcgataaccgtacgagccattgcggggacgtctatcgccacagtgctaatgggtgggttggcgcagtcggagaaggggatgccgtcgactcccatgagccgtacgtcgtcgggcacgcggatgccatgttcggtgagttcgcggagcgcgccgatcgctatggtgtcagacatgcacaggatgccacaatcgcccgggacaggcgtcaggaccgcaagcagcatcctgctcggcatcggcggcgacatcgccaacttcaaaagcgcggcccacctggccgcccacgccggcatcgctccggtcaccggccagtccggcaccagcatcaagaggcgagaaaccctccagacggggcaacaaacgcttatagactattgcgccttgtataaatgcgaactgccagtcaaccttaccgttgactggcagttcgcatttatcgctcccgctggcgggagctgtcatgcgaagcatgactgagggtggtccacagccgccaatccgtaacatcacccaacgcagcatttcacgatacggacgtttccgtatcgtattttcgtgtggccaaatagacatttcgggcgaaaaagttcgaaatacccccataactggccataaaaacaattgcttgagaatcactattgacttttatggcgactcggtatatggacacgcgaaacgaaaatgacatggagcaacggtactgtgtcaacagcaatgaacgaagaggcacgattcccttacgtgcccacaagcaattgaggtgattccggtgacattcaaagccccgctcgatctcacggtccacgctccggacggtatgtatgatcccgccaacgagcatgacgcctgtggtgtgggtatggtcaccactttgaacaagcgtcctgaacgcaaaatcgtcactgacgccattgaggtactggtcaatctcgaccaccgcggtgccgtgggtgccgaggagaacacaggtgacggcgccggcattctgatgagcatgccggatgagttcatgcgtgccaccgtgcccgccgaactgcccgaagccggccactacgccgcaggcatcgccttcctcgaccgcgacatcgaaacctccggtcagcaggaacaggccattgccaagatcgtgcgcgaggagggccttgaagttctcgcatggcgcgtggtgcccaccaacccggacggcctcggcctgcaggcccttgccgccatgccgggattcaagactctcgtggtcgcctctccggacggtgctctggccggcgtggacttggatcgcaagaccttccgcatccgcaagcgcgtcgagcatgaggtaggcgtctacttcgcttccctgtccgcccgtaccatcacgtacaagggcatgctcaccaccatgcagctcacccacttcttcgaggatctgaacgacgagcgcatgaaggccaccatcgccatcgtccactcccgcttctccaccaacaccttcccgagctggccgctggcccagccgttccgtctgctggcccacaatggcgagatcaacaccattcagggcaaccgcaactggctctccgcccgtgaaggtcgtctgagcagcgaactgctcggcgagttcgagccgctgctgcccatcaccactccgggctactccgattctggcaccttcgacgagtgcctcgaactactgcacctcgccggccgttccctgccgcacgccatctgcatgatgctgccgccggcttgggagaagaacccggatctcgatccggacgtgcgcgccttctacgagtacaacaacacgcttatcgagccgtgggatggcccggccgacatcgtcttcaccgacggcacccaggtcggcgccctgctcgaccgcaacggcttccgccccggccgctggcagctcaccgacgacggctacatcgtgctggcctccgaggccggcgttctgccggagatcgcgcaggagcacatcgtgtccaagggccgtcttgagcccggcaagatgttcctggtcgacaccgccgaaggccgcatcatccccgatgaagagatcaagaagaccctcgcctcccagcacccgtaccgcaagtgggtggaaggcaactcggtcgagatgagcgatctgccccgccgcgagcacgtgagccactccggacagtccgtccagcgccgtcagcgcgccttcggctacaccgaagaggatctgaagctgttgctcactccgatggccaacaccggtaaggaaccgctgggatccatgggtaacgatgcgcctatgcccgcactctccagccgcagccgcatgctgttcgactacttcacccagaagttcgcgcaggtcaccaacccgccgctggactgggagcgtgaggagatcgtcacctcgctcgaatccgccatcggccccgagcctaacctactggccgattccgagctgcacgccaagaagatcctcatcccgctgcccgtggtcaactctgatgagatggcccagctcaagcgccttgacaaggcccgcatcctcggcggctactatcgcccgtacgtggtcaagggcctctaccaggtcgccggcggcggcaaggccctcgaagagcgacttgacgagatctttgccgaaatcgatgaggccatcgccgacggcaagaacttcatcgtgctctccgaccgtgaatccaaccacacgtggggcccgatcccgtccctgctgctgacctccgccgtgcagcaccacctgctgcgccgccacacccgtacgcagatctccatggccgtcgaggccggcgacgtgcgcgagattcaccacgtcgcactgctgatcgcttatggtgccgcctgcgtgaacccgtacctggccttcgaatccgttgaggatttggcccgtaacggctacctcaaggtcgacgcggacaccgccgtgaagaacctcaccaaggcgctttccaccggtgtgctcaagatcatgtccaagatgggcgtctccaccatcatgagctaccgtggcgcacagctgttcgaggctgtgggcctgagccaggaagtcatcgacgaatacttcaccggcaccacctcccgtgtgggtggcgtgggccttgacgagatcgccgaagaagtggccatccgtcaccgcgtggcctacccgaaccagtggagcgcatccccgcaccgcaacctgcgcacgggcggcgactacaagtggcgtcgtaccggcgaggaccacctcaacgatcccgaggccatcttcctgctccagcagtcgacccaccgtggcgactaccagatgttcaagaagtattcgcaccacatcaacgacacgtcgaaccgtctcatgaccctgcgtggcctgatgaagttcaacaacaaccgcaagccaatcgacatctccgaagtcgagccggcctccgagatcgtcaagcgcttctccaccggtgccatgagctacggttccatctcacaggaagcgcacgagacgcttgccatcgccatgaattcgattggcgcacgctccaactccggtgagggcggcgaatccgacgatcgtatcaacgacccgcagcgctacagccgcatcaagcagatcgcgtccgctcgcttcggcgtgacctccgattacctcgtgcacgccaccgacctgcagatcaagctcgcccagggcgccaagcccggtgagggtggccacctgcccggtgccaaggtcccgccgtggatcgccaaggtccgtcacgccaccccgggcgtggagcttatctccccgccgccgcaccacgacatctactccatcgaggatctgaagcagctgatcaacgatgcgaagatggccaacccgaaggcacgtatccacgtcaagctcgtttccgagttcggcgtcggcaccatcgcggccggtgtggccaagtgccatgccgacgtggtgcttatctccggctatgacggcggtacgggtgcagccccgctcaacgccatcaagcacgccggcaccccgtgggagatcggcctgtccgaaacccagcagacgctgatcctgaacggcctgcgctcccgcatcgtcgtacagtgcgacggcgagctcaagaccggtcgtgacgtggtcatcgccgccctgcttggtgccgaggaattcggcttcgctactgcggccctgatcgtggaaggctgcgtcatgatgcgcgcctgccagaagaacacctgcccgcagggcattgccacccaggatcctgagctgcgcgcccgctttaagggcaagcccgagtacgtggtcaacttcttcatgttcatcgctgaggaggtgcgcgagatcctcgcccagctcggcttcaggactcttgaggaggccatcggccacgttgagtgtttggatcaggacgaggccatcaagcgctggaagtccggcggcatcgacctgaccaacgtgctcaagcaggccggcccggtacccggcacgatcctgcaccagaccatcgagcagaaccacgagctggagaaggcactggacaacaagctcatcgaacttgcccagccggccctcgaacacaaggaacccgtgcgcatcgaaatgccgattcgcaacgtcaaccgtacggtcggcaccatggtcggctacgagatcacccgccgttacggcgaggaaggtctgccggacgacaccatcgacatgaccctgcacggttccggaggccagtccatcggcgcgttcatcccgcgcggcgagaccatgcgcatctacggcgaagtcaacgactacgccggcaagggcctgtccggcggtcgcatgatcgtgcgcccggaagacaacgtcaccttcgacaagcacagtaacgtcatcgccggcaatgtcaccggtttcggcgccacgtccggccagatgttcgtggccggtcgcgccggcgaacgtttcggcgttcgtaacggcggtgccacgttcgtcgtcgaaggcgtgggcgaccacggttgcgagtacatgaccggcggcactgttgtggtgctcggccccaccggacgcaacttcggtgcaggcttctccggtggtaacacttatgtgcttgacctcgatatgaagaaggtcaacccgagtgccatcaagtccggtgcactgctcttcaagtcgcttgatgccgaaacctccaagctggtgtacgcactggtcaagcagcatgtcgaagagaccggttcccagttcgccgcggccctgctggaggactggaacgaaaccgtcaagcggttcacgcacgtagtgccgaagcagttcgtggccatgacgaaggccatggaagaagccaaggccaacaatgtagatttcaatgcgcccggcacctgggaaaaggtgtacgagcaggttatggaaggagcgcgctgacatgggcgacccgagaggattcctgaaggtccgtacccgccgagagttggctgaacgccccgttgaggagcgtatcaaggactggttcgacgttcacgccgaaaccggcctgcaaccgtggacccaaacgcaggcggcccgctgcatggattgtggcaccccgttctgcatgaccggatgcccgctgggtaacctgattcccgagtggaacgacttggtccgtcagggcaagtgggaagacgcctacaaccgtctgtccatgaccaacaacttccccgaagtcaccggccgcatctgcccggccctgtgcgagcaggcctgcgtgctcggcatccaccagccgccgaccatgatcaagcttgacgagcagaccatcatcgatcaggcatgggatttggactacgtcaagccgctgccgccgcagcgtctgaccgaccagacggtcgccatcgtcggctccggccctgccggcctcgccgccgcacagcagctcacccgcgccggccacaccgtcgtcgtctacgagaaggacgacgccatcggtggtctgatgcgttacggcatcccgaacttcaagcttgagaagggtctgcttgaccgccgtgtcaagcagatggaggccgaaggcacccgcttccgcaccaacgtggaaatcggcaaggacatcacgtgggatgacctgcgtgaccgttacgacgccgtcgtagtggccatcggctcccgcgtgccgcgcgatatgaagattccgggccgcgagctcgacggcatccacttcgccctcgacttcctgcccgacgccacgcgccgtatcttcggcgtcaagccggtgcacgacatcaccgccaaggacaagcacgtcatcgtcatcggcggtggcgacaccggttccgactgcctcggcacctcgatccgtcagggtgcgaaggacgtcaccgtgctacagatcatgccgaaagagccgtcaagccgtccggacaacagcccgtggccgaccttcgcccgcacctaccagaagacctcctccatggaagagggcggcgagtacatctactccaccgactccgtgaacttcgagggcaccgaagaggagaaggccaaggtcaccattgataactcgaccaccgccgaaggcttcgtggctgatgagcgtggtcatgtcaccggcttgaaggtcgtctccgtggctcccggcgaaaatggtccgttcactcgccagcctggcactgagcgcgtgctgcccgccgatctggtcctcatctccgtgggcttcctgcacccggacaccgagaccatcctcgaccagctgcccgtcgaactcgacaagcgtggcaacatcgctcgcaatgacaagttcgccacctcccaggatggcgtgttcgtgtgcggcgatgccggccgtggccagagcctcgtggtctgggccatcgccgaaggccgctcctgcgccgcagccgtggacgagtacctctccaaggaaaagagcgagctgccggccccgatcaaggccagccagcgtccgatgatgctgcctcgctgaatactttccaaacagaaacatgaaaatcccttcttcatgaggggatttttgcgtttctgggattaattactgccttgagtcttcagtaatgtttatatttcgagaatattgcatacatggttaacatgaagctcctatggtgtctttcgtcgccaaaaagatgacgccagaatatttgggagagattcatgaacacacgtcatgtcacttcactggtcgcggccggtgcggcaatcgtcatgctgctcagcggctgcggatcgaccggtacctccaattccagcaatgcttcagattccaatatcatttccgtgtacggcagtgagccggcacacccactattccccggcaacaccactgaggccggtggcggcaaggttgtagaccagctgttcgcaggtctggtgacctacgatgcgaagggcggcatccacaacgaggtagcagacagcatcacctccagcgacaacgccacgcattacgtcatcaagctcaagagcggatggaagttcaccgacggcactccggtgaccgcgcactccttcgtaaacgcatggaattacaccgccaacagtgccaacaagcaggccagcgccagcttcttcagcacaatcgaaggctatgatgatctgcaaaagccggacgtggaccccaaggccacgctgagcggcctgaccgtcgttgacgacaacaccatcgatgtcaagctcagccagcccgactcggcattcccggtcaaggccggcagccacgcctacatgccgttgcccgaatccgcgttcaaggacccgaagaagttcggtcagcacccagtgagcaacggcccatacaagttcgtgtcctggcagcacaaccacagcatcgaaatggtgaagaaccctgactacaagggcaatcgtgtcgccaagaacgatggcctgaacttcaagatctatacctcgcccgattcggcatacgccgacctacgcggtggcaacctggacttcacgaacacgattcctgacaccgcacttacctccttccaatccgacaagtcgctgaaggcatacaacgagcccggtggcaatacgctcaccttcaccattcctgaatggctggaacacttcggccagaacgaggaaggcaacctgcgtcgtcaggccatttccatgtccatcgaccgcaagaccgtcgccgagaagatcttccacggcaccgccacgcccgccgtcgacttccttgcagccccaatcagcgcctactccaaggaactcaagggaaatgaagtactgaagtacaacccgtccaaggccaaggaactgtgggccaaggccaacgccatctccccgtggagcggtgagttcggcattgcatacaatgctgatggcactgcgaagaactgggttgaggcaatctgcaactacatcaagaacacgctggatatcgatgccaagagcatcccgatgtccacttccgacgaattcctgtccaatgtggattcaggcaagatgacctccgcataccgcagcggttggggccctgattatccatccgcggacaactatctggtacagctgtacgattccagttcggccgacggcaagggcggcaacagcggcaactacaagaaccccgagttcgatgccatgatggacaaggctctttccgccccgtccaccgaggaagccgacaagtattatcagcaaggtgaggagattctgctgcaggaccttccggctatcccgttgtggaaccagaatgccaccgcagccagcacctccgcagtctccggcgtcgcattcgactacggcggcggcccagtgttcaccgcactgaccaagaagcagtaagcagtaagtaataaacagacagcgctagccccccccgctggcgggggctgtcggcaaagccgactgggggtggtctcaaacagcagaccacccctatcttgttatatgagcgagctcccgtaagcgggagcaatcgagaacatacaggagcacattaactatggaattcaccgtatccggcactaccgtgcgattcgatgaacgaacaatgcagttcgcttttacgcgcgacggtgccgaatggaatacctgcgctgatttcaagccgaccctgcaatgcgcgcaaggcaccttcgcgttcgcggatgccacttccatcacccatgagcagcgtgaaaccggcacgggaaccggcattcgcagcatcttcaccggctttgggcacagcgcatactcctttgaaacctatgtatgggtggagcgtgcctcaggcgatgtgctcttcgaatggattccgctcaatgagcaaggcctgaacatcaccaatgtgacgtggcccgcagccatggacttcgattgcgccgatgaccatgacacgacactcatcacccatgagcaaggtgtgatgatccccaacacatggcctaccgccgtgagcaccaaagatatcgccttcgacggtcgcttcgaaacggctggcggttacatgccgtggttcgcgcagctccgcgcagacggacacgggtatatcgccatctgcgaaactccatggaatgccggttacggcatcgaccatcccagcgatggcccgtacacccatatcaatacttggtttgagccaagcctcggcacaatgaattatcgccgcgtggtacgctaccagttcctcgaccacgccgatcacacggcggtgtgcaaggcctatcgttcgtacgtcaatgaacgaggtcgcttgcgtacgctcgtcgaaaaggcggcgcgcaatccctccgtgcgtgacctgattggtcgttcatgggtgcacatcggcatcaaaaccaaagtacagcccgactcgtactactacgataaggaccaccccgagaaaaacgattcattggtcacctttgcgcagcgcgaaaagcaaatgcgaacattgcacagcatgggtgcaggccgactgtacatgcacttggatggttgggcacagcccggatacgacaacgcacaccccgactatctgccggcttgtcaggaggcaggcggctgggaaggcatgaagtcgctggtcgacgcctgccatgagcaaggcgatattttcggcacgcatgaccagtaccgcgattactacttcaccgcgcaaacctttgatgccaacaatgcgattcggctggcagacggtacgatgcccgaacacgcacgctgggcgggcggccgccagacctacctgtgcgccgagctcgcaccggactacgtacgccgcaatttcgccgaaatcgccgcgcatggcatcaagctcgactgtgcatacttggatgtcttcacctgcaacgaaggcgacgaatgctcgaaccccgaacaccgcatgacccgccgcgaatgctttgaccgccgcgccgaatgcttcgaatatctgctctcgcacggcatcctctcctcgtccgaagaggtatcggactgggcagtgccaagcctgatattctgccattacgcgccatacgacttccagatgcgctcacccaacgagccgcgccaaggtgtgccggtgccgctgtataacctcgtctaccatgattgcgttatcgagccgtggatgatggagcgtgtggtggacggcgacgattacatgctgtacgccttgctcaatggcggagctccatacctgattcgcgatgccgcatacatcggcgttgacggcgacatggacgacgaacagcgcgctcgcacggaaaacgacatcgaacgctgccatacggtcgctgcattccatgagcgggtcggcatgcaggaactggttcgtcacgagttcgtggatgatgatccgctggtgcagcgttcggtattcgcggacggcactgcggtcacttgcgacttccatacgcaaacctatcgcatcaccgattgaccgcatcactgactgaaaaaacaatgacacacagtgggttccgatggactggtggcaaattgccgccgataagcgggtaatatagccaacagtgtcaccgtcgaaacaggagtagtgaaatgccgaatcgtgcagaacgccgtgcccaagccaaagcaggccgcaggggagtgccgtcgcagtatgaccagacccgtggccgtggccgttcgggaatgattgacgaatatcagctgcagcagaagtcccagcgtctgcaggacggcaccgacggcaccgaatggaagcccagcggcggtacgattgcggaccccgaaaccctgctgaccactaacccgaactacacgaatccgaagatgttcaaggcaccgcattcgctgcgtcagtggttccgtgtgggcagctggacgctgatcgccatcgcgattatcgcgttcttcgtggttatgtggctgccaagccatccgatgtggctgatcatcaccgtttccgcggtgttcattgtgggtgtgctgagcctgttcttcacggctggcgattccaagcataatccgaatttggatcagaacggcacggccgtctgatttttttgcctggtaaatccggcttgaaaagcaaaacgcacgacggaagttgtgcgttttcttgtatgcggtgccctaaagtaagaagtgcttgagtttctttctgacgcacgaaggagaggcagtccgatgaaagttgatattctaacccgcgaatacccgccgcatgtgtatggcggtgccggcgtacacgccgaggagctgtccaaggttttggccgagcgcattgacgtgaccgtgcgtgcgtttgatggcaagcgcactgaggctgatatccccgcgattcccaatgccgctaatgccaagggcagtctgaaggttgtcggatacgatacgccgtccgagcttgccgatgccaatccggcattgaagaccttcggcgtggatctgcagattgccaacgacgttgacgccgatatcatccacgcacacacatggtacgcctgcctggccggctacctggccaagatgctgcacggtacgccgctggtcatcaccgcccactccctggagccgttccgcccatggaagcgcgaacagcttggtggcggctacaacctgagctcctgggccgagaaggacgcctacgagcacgccgaccgtgtgatcgccgtttccggtggcatgcgcaaggatattctgaccgcctatccgaatcttgatccagacaaggtggttgtggtctacaacggcatcaccatggccgacttcgctaccccggcaccagacgatccgggttggaaggtgttcgagcgttaccacatcgaccgttcgaagcccaccctgctgttcgtgggccgtatcacccgccagaagggcctgccatacctgctcaaggctttgcacctgatttccaaggatattcaggtggtgctgtgcgccggtgcgcccgacaccccggagattgccgaggaagtcaagaacgcgttcgccaagctggacgaggagcgcggcaacatcgtgtggatcgaggaaatgctcccgaagcccgagctcaacgcgctggagcacggctgcgacgccttcatctgcccgagcatctacgagccgctgggcatcgtgaaccttgaggccatggcctgcggtctgccggtcgtcgcctccgccaccggcggcattccggaagttgtggttgatggggagaccggctatctggtaccgatcgaccagctgcacgacggcaccggcacccccaccgatccggacaagttcgtgcacgacatggccgccgccatcgacaagatcatggccgaccccgagctcgccaagaagatgggtcaggccggctacgaacgcgcccgcgacgtgttcagctgggagaccatcgccgacaagaccgtggaagtctaccagtccgtgctcgacgagcagaagaagtaagtagcgctgcaacgagtgccc

SEQ ID NO: 3044 - DNA, 4907 bp, Unknown
  R19_24m  MAG No. k141_22376
agggctgggttcattcatttggtaggttgcgcgttcatttggtgggttgtcggcatggtgaggcgttggaatggcggcatttcaatggtcagtgttggagtgcagtgaccaaatgaacgcataattgacctaatgaatgaagtaagccggttgcgggctagtttcgatccagttctatgagcgccgacgcatcttggccacggcattgctgacgcaaatacgcagcacaatggtgaagacgactaccataatccccagaatgccaatgttgaaccagaactgatccgtggtgtgctcccacagatcatcctttttgaacatcggcaccttggtggggccatacagcagatcgttgagcccgatatccgaggcggcggcggagaagccccaacgtccggggaagatcatgctgaccagctcgaggctgtcgcggccggtgaccggaatcatgccgccggagaacaccaactgggccatgaccagcaccaccagcaatggcatcgtctgttctcccgacttcaccaacgccgagccgacttcgcccaacaatgcggaagtccacgcagtcagccaaatcgccaacaccagttcgggtatgccggaatcagtgaccacaccatggtccgggccgggcttgccgaggctgaccgcagtggtcagaatcgccgcctgcaacaaggtctgcaaacccatcacgatgagtttcgaggcggtgtatgacgtgggcgacaaacccaccgcgcgctcgcggccgtaaatcgctcgctcggagacgatgtctcgcacggacaaagccgatcccataaaacaggcacccagtatgacgagcacaagcagctggttcggctcggtggcggcgtctttgaaatcgggctcacccaagccatgagaaccgggcacaaccagcgacagcagtcctaggagcaatggcagcaacagcaggaagatcagcaatccggggtcggcgatgatcaaatgcagctgacgaatcaccagagtgatggtctgtttgatgcggaatggctttgccggtttctcatgctcggtgtgccgcgtgatggtggactcggcctgcatggtgcgctggcgtgaatcagtaatcgaatacacccgttccggagattcggcgacatcgttgaagatgtcggcccattccttgccgttgaacgcctggctcatctcctgcacggtgccgaagaatgccggatggccgccgggagcgagcatgagcacgttatcgcacaacttgttgatatacgacagtgaatgggtgaccacgataaccacgcggccggcatccgccagttggcgcaacatggtcatcaccgtaagatccagcgccgggtcgaggcccgaggtcggttcgtcgagaatcagcagttcgggttcggtgagtagctcgatagcggtggacacgcgcttgcgttggccgccggacagtctgtcaatgcgattcttacggcgagacgtgagttccagctcattgagcacgttgtcgatgatttcggcgcgctcggccttggttgagccgggcaggcgcagcttggcggcgtattcgagcgccgcgtccacagagagcttgcggtgcaccacgtcgtcctgcggcacgaatccgatacggctgcgcaacagttcgatgttctgatgcacgtcgtatccatcaaacagcacgcgcccgtccgtggggctgttgagcccggcgacgatggaggtgaatgttgatttgccggcgccggaaggtccgattacggcggtgagcgtgcccttggcgaatacggcgttgatgccgtcaagcagccgggtgcctttgcccacggtcagtccgatgttttcggcgataaccgcgtcgttgctgacaaacggcgtgcggtcgcacagcacgccttcatgcacgatcaggtcggtgttgccgacggtgacgacgtcgtcttcccgcagccagatcttcgcgacgcggcggccgttgacgtaagtgccgttggcggagttcaggtcagtgagcaggatgccgctgctggtggtttccagcgagcagtgtttgcgggagaccagataatcgttgatgcgaatcaggcaggcggtatcgcggccgatgacgcctgtggtgtcgtgctcggggctgaaggacccgtgcacgcggttggtggtgagttgggattcgagccttaccgcttgcgtgctgcctgccagaacggtgccggcggcattcgatggggaaggggatgcgcagggagacggagatggtgatgcgggtgataccggcactggcgatactgccgtcggtgccactgctgttgggcggggttgctgttgcaggtgcgcgagggccggggatacgcggtgcggggccagcggggctggcgttggttgcggttgtaccggttgtgccggttgcggtgctggtggtgtgggttgcactactgggcgtgcctgttgcggcgcgagttgcgtgggttgtgccggttgcgctgatggtgccggcggtagcgcaggctgggccacgtttgccgcagggcgtcgcgggggctgtgccggcgtggacggcccgctggttccgacgatgcagacgatggtggcaccttgtgccagcgtcactttggtgctgttcagcagcagtacggaagtggtgtgaatgccgttgatggacagtccgtttgcactacccgtgtcttccaagagccaaccatcgtcggtaaaggtgacgcgagcatgatggtgagatacgtacgggttgtgaatcaccagatcgcaatccggcgcacgcccgatggtcgtggcacgtgcaggattgggggtataggtggcggatccgtagtgaatagtaagggcaggtggcattggttcagacttccgtgttcttcgatctctctgcacacagatgtaccacgaccgcattacccccggtgaacggggtctgactgatggtcagaaactcagcacctcgaccttgccggtgtcgagctggtaacgggcgccgacgatcatcagctggtcggcagccaatgcctgctgaatgatgggggattgttccaccagcgtctcgatggtgtgggccacgtgtacgcgctcgatgtcttcatgcgcgtcgagctcggcttcgcgcgcctgccagacggacatgccggcctggcgcagaataatcgattcggcggcggcgatgtgctcgtcgaggtcgtccatcgcatccgcggcctccagtgagccgtcggcttcggaagtgatggtgtgcatcaggtcgtccagctcctgctcggcggcctcgattgcgccgcagtgctcgtgaccgagcacacagatcaggctgacgtgcagtttcttgaccgcgtactccagcgaggcgataaccgcgctatcgatgagttgcccggcggtgcgcacggtgaacaggtcgcccaggccctgatcaaaaatgatttccggaggcacgcgcgagtccgagcaggagagcaccgcggcatccgggttctggccatcaagcaacgtttgacgggtctcctgatcctgccatggatggtcgggcttgccctcggcaaagcgccggttgccttgcagcatgcgactccacgttgcgttcgcggtcgattcctgttcaaagtctgactgagccatgaaacctccattatcagcggactgctggtacccatagtagcgattggaagtgcggattcgcgactgcgtgcataatctggctttgcccaaagcataatgagaacgctcacgatctcaatcctgtttaagggtgggccgtgatgatagtcagcacaagggttgcgggtggtgtgataaggctcatacgttacacccgcgcgagccgtggctcaccacattacgataggtggtggtaaacgcttgaagattaacaattcccgaaaggaccgatgatgactcttctgcagcatgaactgaccgatttcaaggtgaacgcattccagaacaacgagttccacgaagtgaccaaggacgatgtgctcggccactggtccctgttcttcttctacccggccgacttcaccttcgtgtgccccaccgagcttgaagacctggccaagaactacgccaagttcaaggaaatcggctgcgagatctactccgtctcctgcgacacccacttcgtgcacaaggcttggcacgacgccaacgagaagatcgccaagatcgagtacccgatgcttgccgacccgaccgccctattggccaaagatctcgacacctacaacgaagttgatggcatggccgaacgcggtgacttcatcgtgagccctgagggcaaggttgtggcttacgaggtcatctcctccaacgtgggtcgcaatgccgaggagctgctgcgccgagtgcaggcctcccagtttgtctacgagcacggcgaccaggtctgccccgccaactggacccctggcgaggaaaccatcgagcccagtctcgacctcgtcggccagctgtgacggtttgaactaaggcatgttgtttgcccccgctggcgggggctgtcggcaacgccggctggaggtggtcgcggcaataggtgaaccaccaccacccgcttcgcgggagcccccgccagcgggggcctgtgtatatgcaaggagtttcaatcatggctcagaccaataatctttatgacgtcgtagtcattggtggcggacctgcgggccttaccgcgggtctgtacctggcccgcgctcgctaccgcgtgctgattctcgaaaaggacgatttcggcggccagatcaccatcactaacgaagtcgtcaactatccgggcatgggccgcaccacgggccgcgcactcacccagaccatgcgccagcaggctcaggacttcggtgccgaattcctctccgccgaagccaccggtctcgacgtggatggtgacatcaaaaccgtgcacacctcacgcggcgacc

SEQ ID NO: 3045 - DNA, 10500 bp, Unknown
  R19_24m  MAG No. k141_22422
cattatgagtccgacacggtcgtcggcgcctccccgtcgaggcggtgcatcgacacgcaggtcgaacgcaggagccgcaggctgttcgccaggttcgtccccgacaagagcgcgctggccacggcgcgcgccgaatacgactggcccggcgtcgccatcgcagcctagatgccgaggtcgtccttgtgcttgttcatgtcctcgacgaccttcttcaaggtgtcgtagtccttgatgtcggcgtcggactggatgactgcgtagtccttcttggcgtattcgttgacgatcttcttgttgtagatgataccgtaccactcgaccgcatacggcatggtgtaggcgtcgtcgccgaccttatgcgagttggtcttgccttcgtcgttgagcagcttgtacacgtcagtgtcctgcaacggttcgagatacctctggtacttggcgaactcgtcgtagccagcgatgatgaacatggtcggagcttcggacttggccagttcggaggtcagcgtggactcatagctgccggaggacgcgatctggatgtcgacctgcacgccggtctgattggtgtagtcctgcgcaagctgctgcagctgatcgaccacctcaggcttgccgttcaagaaataaacatgacccttattcggatcagccgcagtgcttccgcaggcggcgaggctgaacatggtgacggccgcaacgcccgcggcgaggattctcttcatgttcatggtgctcatcggcgttatgctccttccgcatataccgaacatctgtgtccggcgatctgttcttctcaaagggggccgctgaactatgctcagcgactcgttaccgtaagcgttgatgacaacgacatcacgcgatgcaattatgtacataatcggcgtgttgtcgggggattacttgatatttcaagcgttttctcacaccctctgattgcagctctggtgaatacgttgccaaggtactgtgcatgaatcggcaaacaggcgattccccgtgggccacgcccgttacaatgacgtgtatccatccgcccgcccctcaaggagatgaatcatgggctttatgtctccggattccgcattcatgcgcggactgagcaataccgtagatgccatctggatcaacctgctcatgatcatcaccagcattccactgatcaccatcggcgcggcgctcacggctggacacgatgccgcgcggcgcgtggcaatcgcggaaggtcacgtcaccgcgaactatttcaaggcattccgcgcgaatttcctcaaggctacgggactatggattattttcggcgccacgggagctggtctcgtgtattcatgggtggtgttgcagatcacgccgctgctcatccccaaaatcggtctgaccttggtgtggatcatcggattcgaatgggtgtgggcgttgcaggcgcgcttcgagaactcctttggcggagtactggcgaacgcgttcatcttcggcgtctcgcgcattggtgccacattggtattggtcacgatcgacgctatcttcctcggcctgctcgtcgcctcatgggtctacatgccgcagggcctgttcctgctgatagtcctgggctacggatcggtgctcatgctgcatgtgccaattctcgagcgcgtattcgccgcatgcgtcgccctgtccggcacgtccgacgcatccgccccgtccgacacgtccagcaccacgtccccgcaaaggcaatagcacatgggcaaagtcacactgcaggacgtcgccaaggcagctggagtctccaccgccaccgcatcatgggcgatcaacgacaacaagaacgtacgtattcccgaaaacacgcgccgcaaagtccgcaacgtcgccgaacgtctcggataccattccaacgcgtttgcccgaagtcttgcgcgcggcaaatccgatctaatcggtttcatcagcgacggtgtcgccacatctccattcgccggacgagtcattcaaggcgcgcaggacgaagcatggcgcaacggcaaaatcctgttggtggtcgacaccgacggcaatgcgaccattgagcgaaaggccttttcgttcatgcttgagcatcaggttgagggaatcatctattcaagctgggtgcatcgctccattacgccacctgacgagctggaacgcactatgtccgtattggtgaactgctttgacgaatcgggtcgattccccgctgtggtccccaatgaagtgcagggcggacagtccgctaccgagttgttgctgcaggcggggcatcgtcatgttgcattcgtgaacgagccaaccgcatcgcctgcgtcggtcggccgcctcgaagggtatcgtcaggcacttgccgcacacggattggcatacgaccccgcaatggtcgttgacgcaacagccgaccaggaaggcggttacggagcggccgacgcagtgctgaagaccggtgccacggcagtgttctgtcataacgaccgcactgccatgggtttgtacgacgcgcttcgcgagcgaggcttgcgtgtgcccgacgatttgtcgattgtcggattcgataaccaggaggtcatttccgcacacctgcatcctgcactcacgacggtcggactgccgcaatatgaccttggtgtattaggcgtacgctcgttgctgacgctgaataagacgcccgacgccgactacgacagcagcgaaaccgatcgcatcgaagatagcaaaacgcaccgcttcgagccattgctggtgggctgtccttcagtgatgcgcgattctatccgcgcctatcgcgggtagtcggcagcgcgagacacgcgccattcctagaggtgtgcgtcatggcttgacaggtatagtttgaatgtttatcatattgcttaatcgcttaaatgcttaagcgattaaatcaaatcaggacaatacaataaagcatgtttctaatgcgcggagctgcgcagtagaaacagccaggataccgttcgccgcgaaactgcacacaagtccggtagcccgaccacagagcaattggcgagcggtcgtcaaccgaccatataggagtgataatcatgccaaagctgtactaccaattccctggcacgtggttcggcgattgcatgccgttcggcaagggcaacgagttctttctgtatcaccagcgagacaatcgcaatccggaaccattcggcgaaccgttcggctgggatctggccacaacctctgatttcgtgcattacaaggattgcggtgtagccgtgccgcgcggcagggacgacgagcaggatcagttcatattcgcgggatcggtgtttgaaggggaagggcaataccatatcttctacaccgggtacaaccgcgattacccccagcgggacaagccggcgcaggtgctgatgcacgcagtcagcgatgatttgtaccactggacgaaaacccagaacgccatcaccttcactccgcaagaaggctacgatccagacgattggcgcgacccgtgggtcattcgcgacgacgaacatgaccagtatctgctaatccttggagcccgtaagatcggcccgaaaacgcagcagaccggccgcacggtgaagttcacgtctaaagacctcaagaactggacgttcgaaggtgacttctgggctccgaacctatacacgatgcatgagatgcctgatctgttcaagatgggcgagtggtggtatcacatcgttacggaatacagcgatcggcacaagatggtgtatcgcatggccaagagtctagaaggcccgtggatcgcacccgatgatgacgcgtttgacggcagcgcctattatgccggacggaccttcgaactaggtggacggcgaatcctcttcggctgggttgccaccaaggaagactgcgatgacgtaaagaacttcgaatgggctggcaccttcgtccctcacgaggtctaccagcgtaccgacggcacacttggcgtgcgcattcccgacacggtctgggatgcgttcaacgaacgcgagcaaatcgtgacgaatgcggtaatcgacggtactgacgctcgccgtaacgccgtgctggccgagggctgcggagacctgtattcgtttgaagcggacgtcatgttcagcgagggaacgcgatccttcggtctccgcgtctaccgcgatgaggcaagcgagcgtggctatcagttcatcttcccgattggtgagcatcgctacgtattcgaaggcagcccgaacttcccgtggttcaactgtatgaatatcgggctagagcggccaatcgaactggttgccgggcgtgaatatcacattcagctcatcgtggacgacaccatcgccactctgtacgtcaatggcgtcgcactcaacgcgcgtatgtaccagcacccaggcgacgcattaagcatgttcgtcaccgacggcacgctcaccgtcacgaatgcgaccatcagtcgtggactcaaggaggtgtgagccacagtcaccaccgtatgtttgcgaaccgatacgttcgcctgtgattcatccgtacaccatatgaacgccgccgggcgcaaccggcggcgggcctccaacctacgcgcggccagcgggcacgacttgtgcaatgacgatgtccgctcccccgccctgtattgcaacaacaacgaagttatggcattccataggagggaaaccatgaagaagcttatcaaagcaacggccgcaatggcagcggcaggtctatctctgggattgatcgccgggtgcggttccggcgactccaatgcagataagggtcatgtctacttcctgagcatgaaagtagagcaggctgatcagattcgtgagcttgcagataatttcaccgcagagaccggcatcgaagtagatgtcgccacagcatcgtctgacacatacgaacagacgctgaagagcgagctcgccaaatccgaagcgccaaccgtgttcgatgtggacaacaacgacttcctcaattggaccgattactacgcagacatgtccgatacgaacatgtacaaggacctcaccaagcaggactacgccatgaagaatggcgatgaaattggcgctgtgccttacgtgatggagcggtacggcatcatctacaacaaggccttgctgcagaagtattttgatgccaactggtcaagcgtgaaggacgttgagacgatcaacaacttcgatacgctgaggaccgtggctgacgagattcaggcgcataaagatgacctcggtatcaagggcgcgtttacgtcagcgggcttcgatacgagttcgatcaagcggttcggcgatcagctcgcccacgtgccggtgtattacgagtatcgcgatcaaggtgtgacgcaacttccggccacaatctccgacacatacattccgaatttcaagaagatcttcgacctgtatatcactgattcgaccacgccggccagccagctttcgagcgccaccatggatgacgccaattcggaattcgcgcttggcgaggccgtgttcctgcagaacggcacgtggggttactcgcagatcaaggatcagaacgtacctgacgaggacatgggcgtgctgccgatttatattggcactgaaggcgaggagaaggccggcctgacagtcagcttcctgtacgttgcgatgaacaaggacgcttccgaaaaggatcagcaggcgacccgtcagttcttggactacatcctgcaaaacgatgatgcacgcaagttggtcaccgacgagatgggattcgagacaccgttcaagtcatatgcagaaaacggatacaagaccacgaatccaattcatcgcgccaacgacgcctacgcagtcaagggcaattacgatatcgtgatctatcctttgccgagcacacaatgggtgatgagtctcggcaatgcgatgctcgagtacgcacagggcaccggcgactgggatacggtcgcgtctgccttcgtggatggttgggcgtcggaatacaagaccacgcactgattcgaagcgaccggcattgaagtggtaatcgggatttagcgtcctgattaccactcgggaatacgccgcttagcatgctggtgtgctcgtgagcacgttgcttacgagcacaccagcatattccgtattggggtatgggttaccgccgctgcgcaccgtgacttgcaagtcctctcagtgacggaaattctagaggaaaatggctacgtcgagaatttacgtcactgagagcccgccagcgcacgaaattctcgcgcaatgggattattccgagaatttgcgtcgctaagaacccagagcatccgattattgcggttctttgcgctcagcagccaccagcgcaataggcagctagcgttctgcgtcagcagttcgttgacaaattcgctacccctcagccccgcttcgcgggccagctctcctgacaaggagagccggaaacgatatcaacgaactactggcgcaggacgcgccggtatccgaacagaacgtcagagcccgcgcagcagcggctcggcgatggcctggatcacggattcgggcatgtgggaatcgtcgaactcgtggccgggatagctgctcttggtgctttccagcgtatgcagcgcattgagcgcacgagcgccgtcagccttgatgagccggtaggcacgttccttggccagatagtcgatctgtgcgttgtacagcacagtgaacgcatcctcaatcgccggatcgtcggcgtaccgcagtccgttcgtcgcgtgaatcgacacggcctgcgtgaccggcgcatccgcaaccgtgacggacaggctcagcgcctcggtgtcgtacgacacatccggcacgacctcagcgccaccaaccgtcacaatcaactcgtcaacggcgaccggtgccacaccggtgaacgtcaccgtccacgtgcgctgctgcggcaccgccgccacattgccggccaccggggcaatctcgaacgcgttcaccgcaccatcggcctcccagcggaagtccatatgcgtcaccgcgagcgcggaatccgacggctgcgcctggttggtgccatcgtcctccttgaggtcgaacgcgccgttcgcgcccgggaacacggcaacctccagatagcgcggattatccacggagttgaggctgccgttgagctcctcgtccagcggctgcaacggcacgatgccgccggccttcgcgaagaccggaatgccatcgagcccacgccacgcctcgaacttgcggccttcggcagagcccgcctcgtaccgccgtccggtgaagaagtcgaaccatgtaccctgcggcagccacacgtcggttttcgccagctgcgcgttgcggtcggacggcgtcacgatcggcgcgacgatcagctcggtgccgaagcggaactcatgctccaccccgtacgcggtgacattttccggcgactgccagtacatcggctcgaccagcggacggccctcggcggcggcacgccagttcatcgtatacagatacggcagcagttcgtggcgcagacgcagcgcgtcatccatcgagcattccgtctcgggacggaagttccacggttccttgccgttaaacggcgaatcggtcgaatgcagacggttgatcgggctgaacgcgccaagctgataccagcgggcctccagctcctcgtcgcggtagccgaacatgtggccgccgatatcatgactccaccagccgtagccgatgttcgacgcagtagccgtgaagtacggctggaacttcagcgacttccacgtcacgactgtgtcgccggagaacccgaccggataacggtgcgagcccgggccggcatatcgcgagaacgtgagcggccagcgcccgtcacgggcggagtcgagataatgcatgtggttcagcatccacagcgggtcaagacccttctggcgggtcacgccgccctgctgccagtccagccaccagaaatcggtgcccagggcttcgagcccatggtgcaggtcgaagtacgcttccatgaatcgcggactggtcagatcgaactcgaccggctcgccgcccgccgggtcaatgcccatgtgttcggcgactttggcatagccgtcttcaaatgctcgaacgccgtcgcgcgggtggacgttgagcgtcgtgcgcagtccatgctcgtgcagaatgcgctggaatcgctcggggtcggggaagaattcacggttccacgtgtagccggtccatccggatccatacttcgggtcgacattgtcgaccagatgccagtccatgtcgatgacggccgtggtgaacggcaggccttcctgctcgaagcgatcgacaagctccagatactcggcttccgtgtactggtggtagcggctccaccagttgccgagcgcgaagcgcggcagtagcggcgtcgggccggtgagcttgtagaagtcctgcacggcttcgatgtaccgatggccgtatccgaagacatacagatccttgccggggtgctcgcgcggaatgacccacatgccgaatgggttggcctcgcccttgacggtggcggcttcggcgccttcgacgatcacgtttgatgcggaatcgtcgagcacggcccagccgtcgcgggagatcacgccgagccccagttcgatctcaccgtcgaccgcgtccagcgtacgcgcggtgccgcgcaggttgccgtcctgggcttcgccgtagtgccacgtattcatctgggaattcgccacgcctttgacgacgatgctcagaccttccttactgaacggctgcatgtcgtaggtgaggcgcagcgccggcgtatcgatgatgagcagcccgtcgcgctcggtcttcgtgaacttcggcgggtttgaagtgccgtccgcacggttcgcgccatccgcaccgttcgcgtcatccgacaaccaatcgcgattgacgatcatttgggtggcgtggtcttcgaacttgccgttgtcctgccattcgaggcggacgagcgattcggtgatgatgccgatgcgccaacggtcgccttggatgaccgcggccgggttcatgcccggatgggtggccagctgtggaaaggtggacattggtgtgctcctttgctcgtgttattttccacgttgttgttagtgtatccatgaaccatcgccgccgtgcgggcctcagacatcgcgatacgctccgtcatggtccttttcatgcggatatactgttaccgacggcgacacgcatcgggggcattcatgcggcgatggccgtggtgtcgcgcagcatcagctgcggggccacggtttcaaatcgcggttcggacaggggtccttccatcgcggcaagcgctttgcgcgcggcaatggcgcctaggtcattcgggcgttgccgcaatgtggtcaggcccattttggcgctgaaggggatatcgtcgaagccaattactgacaggtcacgcggcacgcgcagcccatattgcggcaaccggtacagcaccggaatcgccatttcgtcggtctggaagcagactgcggtgggcgtgggcgacatggtggtcagctgggcgagcgccgcgccggtcgtatcctcatggccggagcagcgaatctgctcaagcgtgacgtcaggatgggccgcagcggcatcgataaggccttgcagtcggttttccgcactgaagcgcagttgactggtgtcatccggcgcgccgtacacgtaggcgatgttgcgatggccgagcgaaatcaggtgttcgaaagccgtatgcatgcccagcttgtcgtcaatgcacaccgcgccgtcaagtccgatggtggacggggtgttgatgccgatgagcggcacgttcacgtctttcagacgactgacctcatccgggtcgatgtcgaacgagcagacgatgaccgcgtccacattgcgacgaaccggcagttcagtgaagaaatcatgccgttcccgcgcgttcgacaggccgtatacggagatgtcgtatccggccgggccgaatacggaattgagcccgcggaagacattggcattgaaccagacggcaatggtatcggcatgcaggagtgcgatgcggaacgattgtccggatttcaacgcggccgccgaccgggagacctggaagtcgagtttgcgtgcggcggcgaggactcggtcacgtgtcttcggcagcacaagattcggcttggcgaaggttcgtgacaccgttgacacggatacgccagcctctttcgctaccgcttgaatgctcgcttttgccatggcaacctcgctcatcaacagtggataacaatcccgctcaaaagacaacgttatcatacctaagcgagcaacatgcacgccacgctgtctatttagaagtgcaacgcccctgttcgtcggctaattctagcagttcgtcggtgaatgccccgggctgaacccgggttctagatagaagcgcaacacccgctctatggttggaagtgttcaggttctaactggagaaggtgttgcgcccatgaggaaagtgtattcccacttgtcggcacaggaacgcatccggatc

SEQ ID NO: 3046 - DNA, 7408 bp, Unknown
  R19_24m  MAG No. k141_22575
ggcgtcatcgtcattggccacgaccatcaggtcgtactggtagatctgctcgtattgtttgacgccaatcgtgtcgacggtgtcattaatcgcaaatccgcagataatcaacgctgtgcaaccggccacgccgcccacggtcataatcaagcgcgacttgaatcggaagatattgcgcgcggtgactttgccgaggaagttcagccggctccataccgggcgaatccgctccagcaatatgcgagcgcccgctttcggtgccttcggccgcatcagcgcggcgggcgtgtgccgtatctcctcgcgacaggcgagcgcggtggccacgcccacgccgaccacgaacagcacgatgccggccgaaccgtacagccagtcgtattcgagtcgcacaccgggcaatatatacagtccctcaatcaccaccagcaggaatgccgggatgccaaggaatccgaccagcagaccgatgccgccgccgaccaggcaggcgagcaacgcgaacagcagataccggctggacacggcgagtccgccatagccgagtccaaggtaggtgccgataagtccgcggtcttcctcgaccatgcgggtcatggtggtcaggctcatgagcacggcgaccagcaggaacacaatcgggaatgcgcggccgatggattcgatggaactgacgtctgatttgagcgagctgaatccgtcgatcgaagcgcgcgtctgcacataccaacgtgcgttggccacatcgtcgatgcgccgttgctgcttggcgaattcgctttccgcttcgcttcgcttcgcatcgagttcagactgcgcatcatccagtttcgccttgccgtccgcgagctgttgttcgccttcttccagctgccgctcgccttcttcgagctgctgcttgccgctggccagttgggcggcctgcgcttcaagttgcgccgactgggtttcgagggttgcggcattcgcttcgagttccgcggatttggtattgagctgtgcctctcctgcagccgcttcctgttccttggcggtcagttgcgcgttctgctggtccaaggtggattgtgcgggggcaatggtttcgtttaatgtgcgctgcaaatcggctttctgctgggtcagactgtctcgctgcgtttgcagttccgtttgcttggcggccagctgttgccgcagctcactgattgacggcacttcaggcagggtaatgccaaggcgcgcgagcagttgcttgatggcctgccatgtgggtgagttgaagtcgatattcgggtcaagttgcgccagtagattgtcggcctgttgaatcatggacagcatctgatcaatttgtgccacgccttggtcgatttgggtaatgccctgttcgattttcgtgcgattggcagtcagttccgtttgcgccgcatcgagctgtttgcgagccgaggtgagctgcgctttgcccgattcgagctgggtgcgcgcttcggctatctgctggcgaccttgcgcgatctgttgacgggccgatgcaatctgcgcacgtccatcggcgagctgccgttcgccatcggtaatggttgtcctgttgttctccaattcggtacggctatcttgcaatgtcgttttgttggcttccagctcggcccagttgtcgtcgatctgcttctgggcttcgtccagctgctcgttggcctcgtctttggcatcatccagtttgcgctgcgcgctggagacgatctgttgacgacgggctttctggcgtgtggcctgtatctgatgttcgatacggtcggccacggttttgatggcttcatcgtaggcatcggaaaacgtgtcaaaatcggacgcaccagtgacggcaaccgatatcgcagtgtatatattgccggtcacgccgtcgctgggtgcaaagaacgtatagtcctcggatgaggtggaccggaaggaggtcatgcccgaatagccgtctggattgttgaggtcgcgcgggtcgagtacgacgccggtgatggtgagtttcgtggggaactgcggggattgctcggcgtcggcgtccgtattggcgtcggacttcgcatcggatgtcgaggcattggcggcgacacctaccgtatcggcattattggaatcgtcagtctccgtggccgctaccgatatgacggatgaagaggtgtcttgtggcgtcacagtaatggtgccgccaatcttgagtccgctatcgttcaggaattgctgcgtaaccgccacttcgccggccttgttcggcagtttgccctgccgtatgtacggctgatcaagcccttcggtaccgatttcctgcatggtcacggttttcttggtgccgtccaccaacgtggtcaccgtctgagaacgttcgggctgcacggtttgcacaccgtcgattcggcgcagtgccgttgcatcatcatcggtcaggccgtatgtggatagcacctgcaggtcatgcagtccctgctgatcgtaaaaacgaccggccgccagaaaagcatcgcggcatccggcgtagatgccggtcagcacggccacgccaagcagcgtgatgacggcgatcgagacgaacctcttccagctgcgcagccagcaacgcaacgtatctttggcaaataccgcagaaacgcccgctcctcgaccgccgctatcgtcgaggttccgccgcttcacagaatgtttcacaggttgtttcacgaatcgcctcgcttgtttcacggggcgtttcacagagtgtcttgcagtgagcatcgccaatcacctaccattcgatatcggcgatgggccgcggcgttgcgttgacctcctcgctggtcaccttgccggagcggaagcgaatcactttgtgagccatcggtgcaagcgcggaattatgcgtgatgatcattacggtcatgccttgtgtttggcaaatatcctgcagcaactgcagcacttccttgccggtctcgtaatcgagcgcaccggtcggctcatcgcacaacaacagcttcggctttttggcaatcgcgcgggcgatggatacacgctgttgttcgccgccggacagttgcgcggggaagttgtccatcctctcccccagtccgactttgcgcagcgtttcctctggatcgaaatggtcagggcagatttgcgaggcgagctccacgttttcgagcgcggtaaggttaggcaccagattgtagaactggaagacgaagccgatatcgttgcgccggtaggtcaccagttcctttttccgcagacccgtaatatcgcgtccgccgaccactacgcggccggttgtggcggtatccatgccgcccagaatgttcaatgccgtggttttgccggcaccggactgccccagaatcacgcttaattcgccttgttcggcggtgaagctggcctcgtcgagcgcgcgaatcacactgctgccagaaggatattccttgaccacatggtcgaattcgatatacgccatcgcacacctccaacgcgctcgtggcagccacctagccccataggccccgccagaacttcctgctatactcaagtaaaacaacactgtgtcggttctgcaaccaacagttggattgtgggttgtcggaacttggggagaaggccatggccaaagaattgacggaaagccgccgcacccgctacacgagacgtgccatgcaggacgcgcttatcgagttgctgcgcgatcagccgctcggctccatcaccgttaaagcgttgtgcgagcgggccgatgtgaatcgttccacgttttacgcgcattatgcgagcatcgaggaactgctacacgacattgaagacgaaaccatggcctgggtcaccaccgcactcgaacagctactcgcccagccagatcctgccggcatcgagcatgttattgagcgcatctgccagtacattgccgacaatcgcaatcatctccaagtgctgatgagcccgaaagcggatatcggtttccagcagcagctgctgggattgatttacagccagcgcggtgtaggcgaacagttgcaatcttcggcgggttacccagccgaggcgcagatgcgtatgcgattcgccgtgtccggcagcattgggcttttgcaatattggctcgccaacgatctcgcggcctctcccgaatcggtgtcccacaccatcttcaccatgtgtatgcctgccacgcagtgagcacagtgaactcagtgaactcagtgaagcgtgcggtttcataagcatcgctcgctatagcttcgcctgctcaccggccgcgcccacgcccgcgcttgcaatagcgcacaaatagacgattgaccatttctgagacgatacggcggcatagaataacgaacgttgcgcatcacggcaagccccgcgtgcgccaaacccaagaaatgtgagagaagagcacaatgagtactactgatgcgcctaagaagccgcgcgaaaccgacgacgtgccggtgccggccacgctgcgcaagtcattgaaaaaccgccacatccagctgattgcgctgggcggcgccatcggaaccggcctgttctatggttccagtgaatccatcgcgctggccggaccctcgattctgctcgcctacttggttggcggcctcgcgattttcgcgattgtgcgtgcactgtctgaaatgtccgttgaggatccgaaggcgggcgcgttcagctactatgccacccgctactggtccaagcgcgccggctttatttccggctggaactactggttcaactacatcctcgtctcgatggtggagctatcagtggtgggttcgtttgtgaactactggttcccggcgattccgacatgggtgtcggcggccgtgttcttggtgatcatctgcgccgccaacctgctgggcgtctctaaattcggtgagttcgagttctggttcgccatcatcaagattgtggccgtgatcgccatgattatcggcggcctggccgtcatcatctttgtcctgcccaccgcatccggcgtgcgcgcaagcttcgcgaactggttcaccgtgggtaacggcttcttcccgaacggcctgatggggcagaattccgacggttcctggaccggcctgctgatggcactggttgtggtgatgttcagcttcggcggcaccgagctcatcggcatcaccgccggcgaaaccgaggatccgaagaccacgattccgcgcgccaccaatgatattatttggcgaatcctcgtgttctacatcggcgctctgggtgtgatcatggccgtagtgccgtggaacaccatcgatggcaagtccagcccgttcgtgcagatcttcgattccgtgggcattcacgcggctgccggtattttgaacttcgtgtgcctgaccgctgtgatgagcgtctacaactccggcctgtacgccaactcccgcatgttgtactcgctggccaagcagggcaatgcgcccgcttacttgggcaagctcaactcgcgcggcgtgccagtggccggcgtgctgacgtccgccgcgatcaccgccatcgccgtggtcgtggtgttcgtgtggcctgagttcgcgttcaactacctgatgtcgattgccaccattgccggcatcatcaactggacgatgatcatgctcaccgaaatgaagttccgtaaggtggtcgccgcgggcggcgctcccgaggattccgagctggccggtctgagcggccaggaggcactggacgcgattcacttcaaactgccgtttgccaaggtgaccccgtgggtggtgctggcgttcctggcgctggtcgtggtgctgatgtgcttctccaccagctaccgcatcgccgtcatcgccggcgtgatctggctggccatcctcttcgccgcctaccagctcactcaggcgaagaagtaaggctccatttgcgaatagctctcactgatgagcactcagtgagagctattcgcaaatgggatttattcatgaaacagctcatcgatgccgacgagctgaacgtcggattgagacgccgcagcatcgtcgaccagtgattgatcgaaaccgccgagcgaaaacagcaggtatgttcgctggccgataccggttcgcgcagcacggtctcgcagtagattcagcacggaacggtccaccggcgcattgcggaatttgcactcgcccacaatggcagcatcagacgcattgtcaacggccatcacgtctatctcatcctgacgatcccaccaacggccaaccgcacgcgcacggaagggcaaccgtccagcagcactctcacgccacatccattcacggcacagaccctcgaacggtttgccggcaaaatcatgtaataccggcttgatatgacgctcgtatacgccttccacatcgccccgctccaattccgaacgatacggaaagacaaacgaataccagaatcggaagaaattgtcgctcagctgatacagcccacgcgaacctttcgcccgctccttaggctttgccgtgactgggaactcacgttccacaatccccagttccataagattggcgagatacgacgatactgttgcgtttgccatcatcgtgtgtgtcgcgatctcattcagcgaagttgcgccgagcgcgatcgcccgtatcacgctgttatatttcgcagtttcccgcagttcttcgtgcaacaaaaattcaacctcgctgtatagcggagcaatgcgtctcagaatatgccgcttgacatttgcgtctatggtctcatctgggtcaaattcctctaggtaacgcgggataccgcccagtattgcgtaggccagcgccttatcctcgctactatagttggggaagaattgcgctgcatcccaatatggcatcggcagcatcttcaggatgccggtcgcacgaccatatagcggcgatttttctcccaacagctccttttcgatgaagctcatggcactgccgcaaatcacaatcatcagatttgcatgacgcaacgtgtggtcccaaagattctgtagcactgacggcaatgacggatcagatttgaccagataaggaaactcatcgaatatcacaagcctgcggccgccatcgctcggctctggcagccgggttaactcggttaacgccctttcccaagaaggatattgactcagataatccttgcccggggcacccgcctcgaacatgagacgggagaacgatgccagctgttcatctttagtggcattctgcgccgcgaagaataaggtttccttgtcttttgcgagttgaataagcgtctctgtttttcccacgcgcctgcggccgtagacgaacacaagctgtgccctacgctcagtgaaacattcctgcagttgcttgaggtcatcgtctcgtccgatgaatgccatgctgcccgcctcctttatgccatacgccggcgtatttctatcgcatcacgatttattgtatca

SEQ ID NO: 3047 - DNA, 20936 bp, Unknown
  R19_24m  MAG No. k141_22621
cattatgagtccgacacggtcgtcggcgcctccccgtcgaggcggtgcatcgacacgcaggtcgaacgcaggagccgcaggctgttcgccaggttcgtccccgacaagagcgcgctggccacggcgcgcgccgaatacgacatctacaaggacatccccgcgccggcgcgcatcgaccgcacctgggacaacggcaccgaatcctcctgccacatgctcgtggacgaggcgctgggcatgctcgcctatttcgcggacccgtactcctcctaccagcgagggtcgaacgagaaccgcaacgggcgcatccgccgccaccttcccaagaggaccggtttcgacgacctgacggacgcggacctgcaggccatcgtcgatgagatcaacgacacccccatgaaggtcctgggctgggaaacgcccaacgaggtttggtaccgcgagctcggcaagccaatgtcaaagacaagccacccgaagacgagcgttgcacttacaaattgaattcgggaggagggaacccatgaccgcgaataacaagcgcgatgactggtggaagcaagctgtcgtcttcaggtctatccgcgtagcttcaaagacgccaacggtgatggacttagcgacatcgcaggcgtcaccgagaaaatcccctatctcaagacgctcggcgtggacgccatctggctgagcccgttctacccctccgacctggcggacggcggctacgacgtcatcgactatcgcaatgtcgatccgcgtctgggaaccatggacgacttcgacgccatggttgcagccgcacacgaagctggcatcaaagtcatcgtcgatatcgtgccgaaccataccgccgataagcacgtcttcttccaggaggcgctggctgcaggacccggttcgcccgaacgcgaccgctacatcttccgagacggccgcggcgagcatggcgagctgccgccgaacgactggatttccctgttcggcggcccggcgtgggaacaggtgcccgacggtcagcggtacctgcatatcttcgccaagcagccgccggacgtcaattggaacaatccggacatccacgaagagttcaagaagaccctgcgcttctggtccgatcacggcaccgacggcttccgcatcgatgtggcgcatggcctggccaaggacctggaatccacgccgcttgatcagatggacccgctggccgtgcagcatggcctctgccacgacttcacgagcccgctctgggaccgccgcgaagtgcacgacatctaccgtgaatggcgcgaggtgttcaacgagtacaacccgccttgattcgccgtcggcgaggcatgggtcgtgccggagcgccagcatctgtatgcgagcaccgacgagctcggtcaggtgttcaacttcgagttcgccgaagcgaactgggatgtggacgcgatgcgtgcggcaatcttcgtcggtctgcgctccgccgagaaggcgcacgattcgacgacgacgtgggtgatgagcaaccatgacgtgccgcgtcacgtttcgcgttacggcctgccgcgagtgccggcctcgtcgcatcaccagctcgccaaggactggctgctgcgcgacggcaccagctacttcgaagatcgcgagctcggcaccaagcgtgcgcgcgcggcgattctgatggagctcagcctgcccggttcggtgtacatctaccaaggcgaggagctcggcttgcctgaagtggcggacatcctgtgggatcgtctcgaggatccgacccccgttcttcacccgcgaacggttcatcgaaaagggtcgcgacggttgccgcgtgcctctgccgtgggtcgccgccgacgtgcctgcacccgctgaatggaacgcgggattcggcaccggagcatcgttcggattctccccggcgacgaaggccgacggctcggccagtgcggacccgcatctgccgcagccactgcggtacaaggattatgccgccgatgccgaggctgctgatgacgcgtctatgctgaacctgtatcggaccacgctggagctgcgcgctttgctactcaccgcaaccgccgatacctcggactgcgcggccatcgatgccggacacgacgtgatcgcgtactcccgccccggcacggacggacgccgtttcgccagctacaccaatttcggtgtggcggcggtgacgctgcctgccggtgaggtcgtgctcgcctccggcgatctgaccgctgacggcgctctgccgcaggacaccacggtgtggatcctgctcgactaattcttccttctcctctttcccctccgcggcttcccgggtcttcccgggaagccgctttttgtatgccttgttggacgtgtggatgtacagagaggggtgtagccgcgttgtagaggactgcgcgcgggcgggcatacgcggtggtgacgtgggcgtgaggggttgtataagccccaaatcagcccctcgtaagcgagatatgtggctcgtcagtcgaattgcggtttggcatgattctgcatgcctagagatgctagtggtctgccttataaataactgaaggaccagctttttctctccccccagtcagcttcgctgatagccccctcgtcagagggggcacataccgccgctgtctgcttcaaggcaacgtcccattagaagccgatgccggcttgcatggctccccttgtcagggggggcgtcccgcggaagcgggactgaggggtagtcatttaacgaacttccgacggaggacactagagagttagggtcgcgctccagtgcgcatacgaagggggggcttcccggaacaatccgggaagccccccttcggcttgtaatcgtcagcccttgacggcgccagccatcacacccttgatgatgtacttctggcacacgaggtagaagatgataatcgggatgatggccagcacgaggcagcccatcatggcacccatatccaccgagccataaccacccttgaggtactggatggcgattgacatggtcttgaaccggcgcatgtccaacgtcaggtacggcaggaggaaatcgttccagatccacatggcctgcaggatggcgaccgagatcacggacgggcgcatgatcggcagcgtgatttggaagaaaatgcgcggcacggaggcgccgtcgatcattgcagattcctcaagttcctgcgggatgcccttgatcacgcctgtgaatatgaacacggccagaccggcgccgaagcccagatacacgatccacaggccccacggagtgttcaggccgagcatatcggcgatcttggagagggtgaacatgaccatctggaacggcacgatcatgttgaacaggaacagcaggtacagggacttcgccgtgcggttgttcacacgcacgatccaccatgcgcacatggaagtgcacagcaggatgagcagcactgcgccgaccgtgaccacaacggtccagccgaaggactcgattagattggtgcgcttgatgccgcgtgtgtagttctgcaggccgacgaacgccttgccggtcgggatggagaacgcgttgcggctgatgtatgccttctgcttgaacgagttgatcaccacgaggacgatcggaaacacccaagccagcgagatgatggtgaacagcgtggcccacagtactggatgcttgactttctcgctcatgcggacacctccttgctagtggtgagacggttctggatgatggcgattagcgccacgatgatgaagaacacgacggccttcgcctggccgacgccctcgaagccggcgcggccgtagaacgtgcggtagatgttcagagccagcagctcggagctgttggacggggcgccgttggtaagggcgaggttctgatcgaacatcttgaagccaccggtgacggtcaggaacgagcacacggtgatggacggcatcatcaacgggatcgtgatctggaacagcgtctgggtgttggttgcgccatcaaccgcggcggcttcgagcacatcgcccggaagcgcctgcaggccggcgatgtagatgatcatcatgtagccgatctgctgccagcagtacagcatgaccatgccccagaagccgtacacacccgagtaggtgattgaacgaccccagtgggccagcacgccgttgagcaacagcagccagatgtagcccaggatgatgccgccgatcaggttcggcatgaagaacaccgaacggaagatattggtgcctgcgaaccgcttggtgagcatgtatgcgatcgcgaatgcggccacgttgatcacgatggtcgtcacgatcgtgaacagcaccgtgtacaccagtgcgttccagaactccttgtcctgcacggcattgacgtagttgtcaatgccgatgaactgggcgtccgtcaccgtgctgaacttgcagaagctcaggtacaggcccatgatgaagggcaccacgaaaccaatcatgaatgctgcgaacgtaggcagggcgaacagtgcccaccacctgcgaatcgctttgccagtcatagaaatcatgccagcctactttctcctccttgagcacacccgcactactgcgtgcgagtggtccgaatttgggattgttcagtctcctcagtgctgaatagcaccaaatcgaaccggtttaaggttaccataccacgcgtatgaccgatggtcaaacgttgtcacagaaagcgtgtccatcactccttcctcgctgcctaagcacagggcaaaatgctggaaatactgatttttggcatttccgatgcagaataacacatatgataacgttgtcttatcgactgctcaacacatggtcgacgccgtccgcgtttattgttgtgtcatagacgcatctcactgcaaaggagaccggcatgggaatcaacatcaaagatgtggccaacaaggccggtgtctccgtctccacggtctcccgcgcgttcgcccgaccggagctcgtgtcgaaagcgacgcgggccaaggtgctggccatcgccgaggagctgaacttcttgatccccccgctcggccatggtgctcaagtccggccgcgcgctgcgcgtggctttgctgatgagcgatcacattcgtctatggttcagcgcttcgatcatcgaagggctgaaccaggtgttccacgcgaacggctatgacctgtcgatcttccagatcttcagcattgaggagcgccgcgagttcttcgacatgctgccgatacggcgcaacgccgacgccgtgatcgtgccgtgacgctgcacttcagcgtgcagcagcgatacgaatcgttcgtacaggtctgcgaacaatccggtatcgacctgaccgccatcgtcatcgcggacggcgatgaccgcatcagccgggcgaccaccgaactgctttcgatggatcgcatgccgaccgccatcgcatgccaagaagacggtatcgcgattccgctcatgttccagctggcgcgcactggccttcgcgtaccgttcgacgtgtctatggtcggatacgacgacagcttctatgccaatgagatcggattgacgaccgtgcggcaggatccgatcgcgatggcgacatgcgcggcgcttaaagcccttgatctcatcgagacagggaagacggccaagccgtttgaggtctttcccgcgcagatgctggtgcggtccagcacgaccgaggcgaagggctgaggggctgacgaatcccgtcagccgctgaccagacctcgccgtaaaaacggggttccgatatggtatcgaaaccccgttcgctgacgttgcgtgatcatgggctaacagccgactggggcaacgctttcacgccggagtcggactcaggacgcgtgcgcggccgagtactccttggcccagccgtccacgaacgcggtcttgaccgcatcccagctctgggtgccctgtgcgtactcgaggagcgcgttgccgagatcattcttccactgctcggacggcatcatggtgaagttccagctgacctgcgtcttgccggacttctgatcggcgacggcggccgcaaccagcggattgtcggtcttgatgtcatcgaaggtcttgaacggggtggtgaagcccatctcggtgctcagcgcctccttgccggtgtcagaagtgatgacccacttgaggaactcggcggtggccttctggtcggcctcggaggccttggagttgatgcaccagtagttctcggagccggtggcgagtccttcgtcctgctcgtccgggtcgccgatgtagatcggcatcatgcccacctgctcggcggtcatgccggggttctgcagattggtccatgcccaggtgccattctggtagaaggcggcctcgccgagtgcgaactcggagttcgcgtcatcgccggtcttggagctcagctgagacggctcggtggtggagtccgtgatgtacaggtcgaagatgttcttgtagttctccaggcaggtgcccttgatggtggccggctgctcgtgatgttgtcttccttgaactcgtagtagagcggcaggttggccaggtgggtcttgaagcgccagtcggagctggagtcgaagccggcggaggtgaacgcgcccttgatgccgagctcatccttgcgggcctgcatgtcgtcggcgacggccttgagcgtcttgaaggagtcgatatcgtcgatagacttggccttcgcgccggacaggccgaagtacttgttgaggatgtccttgttgtagatcaggccgtaggtctccatggcgtacggcacgccgacgaccttgtcgccgtccttgagtgcgacatccgggttctgcagctgcttgtagacctcggtgtcggacatgtccgccgtgtagtccttccagttggcgtagccgaccgggccgttgacctggaacagggtgggggcgttggacttggccatctccgacttgagctgctgctcgtaggtgttggatgccgcggtctccaccgtgacttctacgccggtttcgtcggtgtaggcctgtgccaggtccttccactgatcggcggctttcggcttgaagttcaggtagtagaccttgccgttgtctccgacctcggcgttggagttggtgtcgctgccgcacgcggccatgctgatggacatggctgccacggcgaatatcgctgctgcggatttgattgtacgattcatcttcgacccttaccctaaatgctaccggtcccatcttcgttgagtcggcgccaccggcaccgttgcttccggcgacagaatctattgtgcactgtttcccagaagaatgcaaacgagtgcaatccatctctcggcagaacggctaacctcggatagacaaagtaatcaaaaccgcacatttttaccactgttgtcgccgttttacagactgcaatcgattgcaataaacgtttgcaactgtgtcattcttcgcgcgcgattacgtcactccctgcgtgtcgcgggcattattccgctccgaggcggcccagtggtttgtttcgctaatgattgaggatttcggttttgtgtctctcccccagtcagctacgctgccagcccgtcccgcaagtatggacgcgctccgcgcggcagcctgctagctcgcttgtcggctcgcatgttgtctacagacagctcttcacggcaacgtcccatcagagggggcaacgtaccgccactgtctgcttcacggcaacggtccgtcaaaggaggcaatgccgctcagacgaatacaagacagaccactagttcgcttcgtgaatcctctgcgctgcttcggcgtccttcgcaccaacgcaatgaggcgggcgaagagcatggaatctgctcctcgcccgcctcgtctcattgcgctcgtcaccgcggccagcggtacacacgatccggcagcgtggggaatgcggcatgcggctcacgctgataccagtacgcgatcgatgccacgtcgtcctgccgctcgaagaagccgcgatggcccacgccgatctgctgcacggtcacgcgcagatcggagcggaaacggatcggatcggggatgtgccagcgatagaagccgcgcatcggcgggcagtcgtcgttgtgataatcgttgtgcaccagttcatcgtgcgcggagtaatacggataccccatgtaaggcgtgcagtagttctgctccacggtcttcccgttcacctgcttggcgaagctccacgagccgccgaagtagtcctcggtaccggtgccgcagatcgtcgggtattcgcggttgccgtcgatatagaacttgaactcgccttcgccccaccagtaccgttcgagcgtggtcagcgccagataggtacccacatactgccccgagccgcgtacgccatcgagcaccacataatcattgcccagctcggtcagccgctggcgacgccactgcgcatggaagtaggcggtatcgggtggcagtggatcgtcgtacaggctgtagtcgatctgatagaagaacgcgccgattgtgttcacatgctgattctcgagcgttatccgcgcgtgcctagcgaacggcatcgggaagaacatgttgaacccgcggttgggcaccacggccaccggttcggagttgacgaggcatgcgcggccgaatccgcagcagaagaaatcgccgagcgggcactccacgctcggctcgctttcgtcatcccagtagaaccgcagcaccagatcacgcagcacgaaacagtcggcgtccgtggtcttttcgtcgacggtgatccagatatgacggatgcagccggggccgtcgatgtcggccaatgtgaccgtttcgccactgggaatgttgcgcaggcaggggctgcccttgcgcgacgggcccagttcgctggcggcgatgccgccgcggccgggctccccggtcggattctccgcgttgatcgcacggctggactcacgtcgtagggtcatcaatgaaccaaggtcggcaatcatcatcaatctattccttccattacacgaaccattacgcgaacggttccggtgccgcacatgacgcacgacgccggaaccgtcctatgttgcggcagtcgccgcgatgccactgcttcgtctatgacaatgacaatggcggtcgccgcacctgctgcctaagtgctcgaatcatgcgcgcatcacttgtgcaccggcggcagcatgccgaagttggactcgtagtcgttccaggcgctggtccaatcgtcgagatacgccttcttgacgccgttccagtcgccagtgccctgcgcgtactcgagcagtgcgttggccacgccgtcggcccatgcctgaccgggaatgtaggcgccgtggatcggcgtcagaccgtcggattccagcttgagtgcggacttggtgagcgggttgtccggctggaagtcttcgctgtcgaacgtggtgaacggcacggcgaagcccatgtccttggcgaggatcttcttggcgtcgtcgttggtgaccatccacttgatgaagtcgagcgtcgccttcttgtccttctcggatgcgttcttgttcacggaccaggagatgtcgtagatggagttcgccgcatacttgctttcgttcgggaagcccatgtagtacggcagcatggcgaggtcctcgtcggccacgtcgttgtccttgatctgcgagtaggcccacacgccgttcgggtagaacgccacgcgaccggtggagaactcggcggtggaatcctcgtagttgaccgagccgagcatggtgttctcggtcgggttgtccttcatctcgagatcccacagggccttgtagttgtcgaggtaggtgcccttgagctccttctcgaagtccacgccctcatcgatgtactcgtaggcgaccgggacctgggtcatgtgcgacgcgtaacggtagtagttggaggcgtcgaggccgggggtggagaaagcgccgtcgaggccgaggtcgtccttgtgctgctggatgctgtcggcgaccttcttgagcgtggcgaaatccttgatgtcatcgaaggtcttgatgaccgagtagctcttcttggcgtactcgttgatgatcttcttgttggcgatgatgccgaaccattcggcggcgtacggcaggccgtacacgtcgtcgccgtccttgtgggccatctgcttgccctgctcgttgagcagcttgtaggcttcggagtcctgcagcggctcgaggtaattcttgtacttggcgtactggtcgaagccgccgatgccgaacatggtcggggcgttgttcttggccagctcggacgacagcgtggattcgtagctgccggaagtggcggactggatgtcgacctgcacgccggtttccttggtgtacatgtcggcgagttcgttccactggtcgacgacttccggcttgttgttcaggaagtagacatggcctgcgtcgctgttcgtgcttgagccgcatgcggccagtcccagcgtcaacgctgcggcgctgatcaggacaattcctttggacagcttattcatggatttcctttcttcatctgcggccacggagccgcctcgcacttgttgttgtacggggtgccggactgcatacgtcgccgttggtgcagccggttttgctgtagcgcatttcgttatgcgttggagtggattattggtctggctcaggtgttgcctcgttgcgtaagcatacagtcgaaccggtttgatttataggatatcgaaccggttcgctatcgtcaatcgggcgtgttccagcgtgtcgctacgtagccgggggtgagtcacggaagggatggtgcggcggcagtggtggcgcgcggaatcagcgtggctctcaccgtggtgaccgtttcgctcaactgctcgcctcgcatgagggcgagcagttgttgcgcggccagtcgcgccatgtgctgcgggtcctgatgcaacgtggtcagtccggcgactgcggcggtcggatggtcgtcgaatccgatgatcgacaggtcttcggggatgcgtatgccaagctgccgcagatgccgcatgatggcgaccgccgcttcgtcggtttcgacgcagatcgcggtcggccgatgctcgctgctggcgatccggccggctatggcagccatggcctcatcttcgctcatggcgtccatgtcgctggatgatgcgaacgcgaccggttcggcgtcgggaatgcattcgcgcatcgcgtcgaggaagaaatccttgcgcagatacgagctggcggggaacggtgccggtttcggatgtgcgacgtatccgatgcggcgatggccgagttggcgcaggaatcgtacggcgtcgttcatggcacgcttgttgtcgagcatcacggatgcgggcaggcgggaagcgctccgtgcgtcgagggcgaccgcggggatatgcatgctggaaagcaacgccgattcgctgtcgtccagcgagaatgacgggaggatgaacccatccatattgcgtccgttgctgggcaggtcggcgaagaatccatgcagttgctccaggtcgcagacccgtacgggcacaagatcgtagccgtggggttccagcgtttcgagtgcgccttcgatgcagctcgcgttgaaccatgacgcaatcgtgcagccgaacagcatgacgacgcgcatggttttgccggatgccagcgatgatgcgctgcgggacagcgtgaaatcgaggcgacgggcggcgtccagcacgagttgccgggtggacggccggacgctattcatgccgcgcaatgcgcgcgataccgtggcgtcggagactcctgtggctatggccacgtcgtggattgtcgccatgatgtctcctttcgctgtgtggtgggcggtgtcagatactgtagccgtgctggcgccgccgcaatcgctgcgacgtacgcccatgcatattaatagcatatatgtatgcgcttacattcttttgtaccacgatgtgcgcgttgttagcggtcacggtttgattgtgtttgcaatggtttaccaatgttctgtattgtgcgcatgtgatgtgacgcgcaatctgcaggcggcggttgacggtgtgtaatgtaagcgctatcattttgttgtgtcaatcaatgcatggttgatgcagccggcatccgatccggcagggcgaccgcaaggtcgtacacggatatgtgcatggaggcacgtatcacatgagcaaggagagccattacagggaggtaatgatgacaggaagaacgtggaacaccatcgccaaggcaatcggcttggtatcagtggcggcgctcagcttcggggcgctggctgcatgcgggaacacgaccgcggtcgacagcagcaaagggcgtgtgtactacctgaacaagaaggcggaagagcaggagaaatgggaggccctggcgcaggcgttccaggacgagaccggtatcgagacccagattcagctttcggccaccgactacgaccagacgctgcgttccgaaatggccaaggacgaggcgccgaccatgttccaggccgacggcccgagcttcatgtacagctggctcgattatgccgccgatatgagcgactccaagatctacggcgagctgactgacagctacaaggaccgcacgctcaagaacgccgacggcaagccggtcggcatcccgtacgcggtggaaagctacggcatcatctacaacaagtcgctgctcaagaagtatttcgatgcatcgtggtcatcggtcaagtccatcgacggtctcaacaacttcaaggcgctcaagaccgtcgccgatgagatccaggaacacaaggacgacatgggcgtcaagggcgcgttcacttcggccggcatggattcctcggcgttccgatacaacttccatctgccttctctcccgctgttctacgagtaccgtgatgacggcgtcgatatgaactccgtgccggaatccgtcaagggcacgtatgtcgactacatgcagaatatctacgatctgtacatcaccgatgcaacggtgccggccagttcgctttcaggcaagaccatggatgatgccacttcggagttcgcgctcggcgaggcggtgttcttccaggacggcgtatggatttactccgcattgcaggatcagggattcccggatgaggacctcggcgtgctgccgatctacatgggcgtcgacggcgaggagaagcagggcctcaaccaggtgatctccaactactggtgcgtcaattccaagtcttcccagaaggatcaggaagcgacccagcagttcctggagtggctcgtcacttctgatgccgcacgtgaatccatctcgcaggacatgggtctggtcacgccgttcaagaccttcgacgaggaggcatacaccgtcaagaacccgctggtcgaagccaaccgcgagtaccaggagaacggctactacgacgtcatcagcgtctccaccgtgtcccaccagtgggaaaaggatctcggctccgcggagctcaactacgcccaggggcagggggactgggatgcggtgaagaaggtcttcaccgatgactgggccaaggaatacaagctcgccttcgccaagtaagcgaagtaatcgacaggcgatccgaggggtcgcagcgtgaggggcgtccgttgccatagtgctggacgtccctcacgcgttgttgtgttgttgcgaactggctcagcgcggcccgctggacagcatgtggccttccgacttcgcacgcaacgtcccagcgaagccgaatgaccatacactggcctgcccgcgtcgcatgtgcggcaattacgttttccaaccatggaagacggtatttcatgcacttttccaaccgtgcacgtgcggagacggctgagacggttggcgcagagacagctgaggggagcctccatacggaagactcccctcatagagacgctactgcaagtcagcggtcatgcagccggtattggccggctgcgaggcgtcatgcaaggtggctacgcatgaaccactggaatttctcgagctgctggacgtgatcctggatgacgttggagctgatcacatccagctcgtccagctcggcgatggccttgcggtcgtcggcgatgaaggcgtcgtagtactcgatcagcgccttgagatacgcctcggtgccggcgcggccttcgacgtcgaacggcttccgcgtgcggttgcgcatgattgcgtcggtacggccgtccggcgtgccgcccagcgtggcgatacgctcggcggtctcatccgcctgagccagcacggattcgacctcaggatcgagcatcttgtgcacggcgatgaagttcggtccggtcacattccagtgtgtatgcttcaggaccagcgcggcctcctgctcctagctcagtcggttctgcagaatcgcgatggccttctcgctggtcgcctcatcgagtcccggcgcaactgattattgggaggtttgagcaccggatgttattccgattcggcactggggttattgtgggatggcaccggcgtgcttggtattgggcactgccggtgccgttcctgtttgcgagactggttggcggctaccggccgggtgcgtgttccctcatgttgtagtcgccggtttctatccaggtggtgttgtgcacgatccggtccatgatggcgtcggcgtgggtgccgcctccgagtcgttggtgccagtccttttgggggtattgggtggcgaacagggtgctgccggtgtcgtgtcggcgttccatgagctcgaacaggaagccgcggaagcgttcctcgggcgggtcgaacagccattcgaccgggcgcgaggaccgtgtacgcgctgtagcgtttgagcagtctggaccgtccttggggcttgtcggcggcctgacgccattcctcctcgaggtcggggacgcggatgtagcgggaacggtaccggttgcggcacgcctgacgcgccagggcgcagacgatccagctcttgccggacccgcagtagccctgggcgacgatgttgcggtgtcgcgtgacccatgagcagtctgagagcgaggcgatcagttcgcggctgatgccgcgttcgtcgagcaggtcgagggtgcgcaggtcggcctgcgggtagcgcagcctcgcccttctggccagtccgccgatgcgtttgtccgtgaacgcggcgtgcgcctcgtcgaccgcgagttttatacgttgttccgcgttcaggggcgcgcatgcgtcgtcgtcctgatgcaggagcgcgtcgagaagctcctggcatcccatgtcgcgcagctggtggcgggtttttgttcgtcgagcctcatcgcttcgtctccctcgcgttgtagtcggcgccgcgcacgtatcccgcgggcggttcgacgtcgagacccttgactttcgggtcctcgccttccatgacctcgtggtcctggccggtgtcgaggatcgtcttcaattgccggtggcggggcgtgttcacgaccctgcgggccacgtcgcacgcgttctccagtcgttgccgcccgtagcggcgcgacagcctcagcaccgccagagcggggtcgatggcctggtccggcctggcatatgattcgaagatgcgggatatgacgatgaccgcgttcgggccgacgcccgacgcccatgccctgacccggggctcgtcccattcccgccagttcgcctttttcggcaggtccacgtcgcgcgtggaggaacggttcgactgaacggcatcgaacagccgatgcacggcgacccgctggccatcgtgccagatctcgagcgtgcgggcggtctcgcgaagctcgacccgggtgccgatcagccggtggggtacggaataccggttccgcctgtaaacgatatggcagtcgttggcgactttcctcgtgccggcccaatcgccggtctcgtacggcatgacgggcagcgggatcatcatgggtcgctcctcggactcgaacaccgccaggcggctgccctcgcgtttctggaaaggcgcggcgttgtacgcgtcgagccagtcgcggatcgcccggttcagttcgtcgagcgaatggaattcccggtcgcgcatcgcgccgacgacggcccgttcggcgtgcaggacgaggttctcgccgctgggcttgtccttcggccgtttcaccctgcccggcagcaccgccgtggaatagtgttcggcgaggttgcggtaatggtcgtccggcacgatctcgccatcgcggggatggctcacgacaccggtcttgaggttgtcgcacacgatcctgaccggcaccgcgccgaaatagtcgaacatgcacacatggcagtccagccacgaggattcgcgcatgtcgccggtcgcgcgcacgaacgagtaacggctgaacggcaggcacccgacgaacaggtacgccttcgacgtctctccggtgaccgtgtcatggatcggcatggtcgccccggcccagtcgacctcgaccgtacgcccggccttgcgctccaccctcgaggtgacgcccagacgcagcacgtaatcggcgtacagcttgcagaaccggtcgtagcccatgaacggaaccccttcacccggcacgagtccgcgtactccgcgtgcagcagcttcaacgtgacgcccacgcgccccaattcgctgtgcacgcgcgcccagtcgggctgctcgtaggcgctctcgatcacacccctgccgggaaacagcagggcgtacacctcgtcatcggttttgtcctccacaccatcgtaggagacgttaagccggtcggcggcgtcgaacacgtcgatcacgctatgcttcgacataccgtagcccacggctatcgcgttgcgcgacaatccttgctcacgaagcctgagcacgagcttcgccttgattctgcgtaccatcgttggcactcctttcgccatgcgtccatcacatggtgaaaggagactaacccaaacggcgccgaaccacaataactttggtgctaaaccacaatgatcccgtgaaacggcaatggtgccgaactggaataaccaacgtgctcagcaagtcaaatattcagcaacaaatgcaagtgtcatgatgttccttcctttcatcttcaaggaacgtccctcccagtctacgcgcccttgtccgacggctgaccgcgctgtggaaggccgccaactggtcatcgggtctttgatcgggaagatggcgcgtttggcgtgtcgccaatgatgtcgcgccttattggcatttgtgctcggttgagagctgttgcgcaaactgcacccaccggtaaaggaaaggggattctgcagttcattcatgttctgtggaatcgttggaaaacgagattcacaggcagaatgacatgtacaggggcaggaagcggcgtatgccatcctgactcatctggcgggggtgcagcacgtattcttcgccggctcgttgtgtgaatttcgcgtggaacttgtctagggacaccgtggaatagcgtttgccggatttgacctctacagggctgactctgggtttcatggctgcgtccgggtaaggtcggatgatcaggaagtcaatctccatgcgctcctcgcggatgctcgaggattttgagtagaaatacaggtcgtgcccggatgcggtgagctgctgagcgacggcgttttccgcgagcatgccctcgttcacgccgtccgctcccagcaacacttgccggtacacttctggcaaggcggagcccgaggcggagaatgccatggtagacaacagtccggtgtcagccatgtagcatttcactgttgcgtcgtcggcgctgagcgccagaccaattgacgggtcctcggcgagggtgcataggttgaccgtcgccgcttcgcgcatccaagagaaggccgtcatgaaatcacgcgatctcgagccgttctcgacttgcgtgtacaccaagcgcttctcgtgcttcgacagctgaccgggaattgcgtcgaacactgctcggattcgtttagccgccgtgccgccgtatttctcgatatcctcgcggtagatcttgaggaccatgcgcttggccctgtcggcggccgccatgtccctattcggggcgtaggccgtgaccgactgtggcatgcctcccaccagcacgtattcgcgccataggcgcgacgccttgcggtgcagcgagtccggcaaggggctccccgatgcaaacgagttcgtgatcatctgagccagcgcctcttcgcccatggcccacagaaactcctcgaaatccagaggacccattttcatggactcttcctcggagggaatcagtatgcccttcacgttttcgttaagggagattagggatcccgtctcgatgaagtcgtaccggccgtcggcgaccaagtgcttgatgaactcgcgggctggcgggaacagctgcacttcgtcgaagatgactagggacttacgttcggtcagggtcacgcccaacatggcgcttaggtacaggaagaaggagtcaaggtccccccttgtgtcgagcagcgttcgacgaaactcgtctcccaccttggtgaagtccacgagagcgtacgaattgtattcgttgcgcgcgaactcctcggcaatggtggatttgcccacgcggcgggccccctcgatcaacatggcggtgtgacctccgcttgaccgcttccattcgactagcttgtcgtaagccttgcgccgaaacatggctcctcccttatgattgcacgtttctaagggttaagtatagtacaagattgcacgtttctaaggtttcgcacggtgggtgaattgcacgtttctaagggttaacgaaatttctgttgggaacacttcgctggccggccccttttgttggagagccgtaatcaacgaattaatgacgcgggatactgggaagaagcctaggcggcatcggaacccgtcacagtatccggctgcgaggatgcatcggtggcgccggctttgcggacttcgatggtttcgatgcggcggccatccaccttggtgacgaccatgttgtagccgtcgtcggaatgcagcacgtcgcccaccgcacccatcttgccggtcttggacaggaagtagccggcgaccgtctcgtacgggccgtcctccaattcgatgccggtcagatcggcgaagtcctcaatggtcatgctggcctcgatcgtggccacaccattgacgaacgcggtgcgggtggtgcgttcgccgcccttctcgctgggcagatcgtactcatcgcgaatatcgcccacaagctcctcggtcatatcctcaagcgtcacgatgccgtccgtgcctccgtactcgtcgatgaccacggccagatggatgccgcgcttacgcagcagttccaggctcggcagcagcttggaggtgccgggcagggagatgccttcgcgcaccacatcgcgcacgatcttggcgttcggatcgcgcacgtccagcagatcgcgcacatgcacgaagccgatcacgtcgtcgaaatccttgccggtcaccgggtaacgggagtacggctggtcgcgtacgaacgcggcggcctcggccaagggctggtcgccctcgatgaagaccacgtcggcacgcgggcgcatcacctcggcgacgatggtttcggacgcgtcgaacacatcgtccagaatcgtgcgttcgtccttggaaaggttggtgttggagctgaccagcacgcgcagctcgtcgtcggacacctcggactcggtctgctgcgggtcgaagccgagcaggcggacgatgccgttcgtgttcttgccgatgagccagatgatcgggcggcagacggcggcgaaggcgtcgatggcgggcaccacggcgcgcgcgatctgctcggtgcgctgcatggcgatgcgcttgggcaccatctcggagatcacgatggagcagtaggagatgatgagggtcaggatgatgttcaccaggccgccggcgatgccggggtgcacgccccagctttcgaccaccggaatcaggtagggggcgatggaggaggcgccgaacgaggcggacaggaagccggagagcgtcacgccgatctgcacggtggagaggaaggtgttcgggtcacgtgcgattttggcgactttggcgccgcgagcgtcctcctgctccatttgctcgatctgcgagccgcgcagagagaccaatgccaactcggtgccggagaacacggaaccgataacgagaaatacaaaaatcaggaggatgttcaaaccaagtgacatgccttcaactctaggggagtggcacgtcaaattggggtgtgctggctgggcagtaagaaactcggcaaagggaagggcattctcatcaccatcgatgagacgcaagcggcctcgcatgatgatttggttgccattgctacagccgtgcagcacgtcattacggatgccgatgaaagtgatacgcctgatgaggataagaagggcgttgtcatcgtatttgccggcttgccgtatatggtcaacgatttgctggataacgaggtaaccacattcctgcgccgtgcgctacgccgcgaattggataacgtgccgcttccagacgtcaagaatgcgttcccggaaacagttgcggattccggcaagaccatcagtggggaagatgcgcttgaagccgctcgccagtctgaaggatacccgtacatggtgcagcttgttggctactacatgtggcaatccgcacaacgtcgaggttcaaatgtcattaccgcggacgacgtgtcgaccggtgtttccgatgcgctgctcgccttcgacgattcaaggacaaactcatccgcccggcaggtcatgggcagctggaatttgcggtgccgcatttggggcagtatttgcagtcgttgtagcaccaaatatagggctgggttcattcatttggtaggttgcgcgttcatttggtgggttgtcggcatggtgaggcgttggaatggcggcatttcaatggtcagtgttggagtgcagtgaccaaatgaacgcataattgacctaatgaatgaa

SEQ ID NO: 3048 - DNA, 8873 bp, Unknown
  R19_24m  MAG No. k141_23295
cggcaagccggtgatctgcgccagatgcttgatggcggacttgcggaatcgcagatccgcgcaaatgccggtgccgatggcggtggcaccgaggttgagctgggccagcagcggcaccacgcgatcgaatgcagccaaatcggatttcagcagcgtggcgaacgaatgaaactcctgaccataggtcattggtacggcgtcctgcagttgcgtacggccgatcgtcacgtcattgatatgtttgtcggccagatcgtggaaggccttggcgagtttcttggtggactcggcgagcggcccgatcgcgtcgataagcgcgagtttgcaggcggccgggtaggtgtcgttcgtggactgcgactcgttgacgtcgtcgttcggatggatgtatgtgtaatcgccacgctggtggccggcgatttccagcgcacggttggcgatcacctcgttcatgttcatgttcgacgaggtgccggcaccgccctgcatcacatcgaccgggaactgatcggccagtttgccggcctcgatttctaggcaggcggcgcgaatggcctcggccttggccgggtcgatcaggcctaattcctcattggcgatggcgcaggcgcgcttgaccgtggcataggcgcgaatcagctcgggatgttggctatcggtgatgccggagaccgggaagttgccgatagcgcgctgggtgtgaatgccccagtagacgttcgccggcacctccatctggccgatgcagtcatgttccagacgggttttgttcgatgtttcgctcatgcttccatcttcctgtgtgagggctggaaacgccagcatgagaggctgattgcgccttgtgagaaacctcacgcgggggttcattcgacggaaacaatccagactcactggttttcggtcaagcggtgtacccggggaatcctgcggggccgttcgacggtgagatgggggatggcgcggcatgcgtggcggcggccggcatgccgggggcggccgaatcctgcgcattgtgcacgaagatgcgattccagtaattaagcatgtccttttggctcatggccaggtatatgcccatggccagcacggccacatcttctttaagcaggtctttgatttcgatggcgtcgctcaattcgggccaacgttgcagcacggcgagcatgccgcccacggtgaactcgaccatgagatcggttttcaggtcaaggttcttggggtcgcgttgcaatgtgctgagcatttgcagacggcagaagtcgcgcagcgattcggtcagttcaagcgtgctgtgcgggccggccaacagggccaggcggtcgaggcgctgccgctgctccgggtcggagagcgtggcggtgacgcggtctcgccattgttcctcgggattgccatttgggtcgggggtgcggttgatcggaatcgattcgacctgatgcaggatggctgaatcggccaattcgggcaggctggagaagtgataatagaacgaattacggttcacgccagcctcacgcaccacatcggtgacggtgatcttgcggtagtcgcggtcggcgagcaattcccagaaagcgttctctaggcgttctttggcgggcagcacctcggaatcatggcgtggacgtggcatctcttcctcctgatgcaccagcgtgatatggtcacgctgtctaataacttatcgggcagtataactattatttgtggacatgtctatgagctaatcggcgatttcagttgcgtcctccgctgagggcgaagctgcggtgtcagtgtcggtgtcggtatcggcgctggccggggccgcgctatctgttcctgtcgcagttcctgctggggtttcggctgttcctttggcggtcgcagaactcggcgcggaagccggggcgggcgtcggcctgcgtttggccgtggacgccttgaacagtatcgccagggcctcaaccaaatgacgccggtctgcgggggtcagccctacatacgcgccaagcatcgccggaatcgaagcggggaagttgctcatcacctcgctgaagctggtggcgccgttggcgtgcagcacggtgaacagcgcgtccaccgcacgctcgcgctgttcgggcgtaagcgtggcgatccaatggttcagctcctcgttaaacaactgcgagctggaactcaaatccggctcggtgatgaactggtcgccatccaatagccaggtgaaggcggaatgctgcataatgccatccgaatcggaagagaccacgcggcaaggctccggggtctcgaaaatcatgcccacaatcgacgaacttggcacgattttcgtcaccttcggctggatggtgcggtaggcggggctggtcacaatctccggcgggaaaccggggccgtccagtgaatagacatgctgaatgcgcttgcgcaccttggggtcggcgttcatggccgcgtaaatcgccagattgcctcccttggaatggccgaccagaataatcggaccctcccacagtcgcgccaccgtatccagataggcgctggctgaacgttgcgccggcaccggatactggaaagccatattgaaatcttccttccatccgatgagcgaatcatcggtaccgcggaaggaaataaccaacgtgcctttgtaggtcggcttccggcgcttgtggccgtcgggcagttggaaggtggcggcggcgaattgggtttgctcgccctgattgatgtgctcgaccaccgcgcccaggcgaacgttggcgtagcgggggttctcgcctgcggcctggaacaggtcgtgggtcaggtccggattgaccactgaaaccatttgggcttcgtgcggcttgtcgtcggcatgcgttttcggcgaacgatgcagctcgcggttggcctcgtcaaggcttaccgattcaagctcgggatgccagatacccttcagccagatcagtggatgcttgggctcgaaagcgcgaatgcgtgcggcgaacgagcctgactgcgtctcatccagcatcaacgtcggacagatactggccacatcctcatagatgagcgtggagatgatcaaggcgtcgatttcgttgaacggcaagtcggcgaaggagcgcgtttcggtgtgcgcgtaatcgataatgccggtcatacgcacctcctgcttccgttgatattgcatatccccttgggccatgtggtcttgcgattgcgtgcggccgtgcggctgcgcgcagcaattaaccatatacattccattgtagggattgtacggttttggccggcgcgatcgagcaagactgcaccgacggcgaacaattcgtgggaggattcccgtcagcttgtcgaaaattgtcgggtagcgggggttgcgatgccagccagccgaccaccctccggcgttacgtgccacttcccgccggcgggaggggtaaccactcaatccttttgacgaggcggaccgctggggccgtcaaaggttcggcagatcgaagcgggccagatccacgccttcgtggtcgagcagttcggccttgatgtcgagtcggccgccgtagccgccaaatgcgcggcccgagccgactacgcggtgacagggcacgatgatagtaaccggattgcgcttcactgcgcctccgaccgcctgcgcggccatgcggccgccaccgcgtcgttcggccaattcggcggcgagttcgccgtaacttaccgtcatgccatagggaatctcggccaccagattccacacttcatgttggaatggcgtgccggcgggatgcaacggcggcacctgatccgagccggggcgttcgccgtcgaaataggcggtcagccattcgcgggtcatacggaacacatcgggttcacgatcgggttcgcggttcgagtcgagaacggcttggtggtcggtggcccaccaccagtcttcaagacagagctcggtcaggccctcgccgtccgaggccatcatcatccggccgatgggcgtttcgactgtggcccgcatcagttgtcgttgcgtcataccgccattatcgcgcgttgagggatgaagcccataccgtgcctgatttcatgaaggacgggtcgtgctgtacggtcagtattgcgtgctgggcagcgatatctgacatagtgggggttcttgggccggcatgagtgttctttccgacatcccaaccgtctaactccgtttcgaggggctgatttgggctgttccggaggtctatctccgtttcgaggggctcctcatccgggaaaccacaagtataaacggctccgggctaacgtcattacgccgtttttggcccgtgtctactcagccaccagccccttgaaacgggagtagacctccggagaaggccaaatcagccccttgaaacgcagcgacccctctgattggagtcaatcagaggggttcggcacattgctgatgcagctggtccgccgtccgccttgaggcggaacgtaaccaagattcaggcgggattactccgcaacgagcgccaggaaggcggcggccacggcggctgtcgggttcgggaattcctcgtcctggttgaagaacggcacgtcggcgtagttcaggaacttcacttcggcacggtcgccgatcagggccttggcctcttcggccagctgatcggttatcgtcatgcgttcctgatttccacggccatggccgtgccagatgtgcccatcgcttggttctacccgctgtttatgctggccatgcccatcgcctggctgctgtatacggccaccgcgagttatgtgcacgacggcacccgataatcgttggaaaaccggtgggacacgcgggggcttggctttttcctgagattggcgtatctttgtcacctgttgcccgtgaaggtaacacatgcggacatagcttagttggtaaagcgcaaccttgccaaggttgagaccgcgggttcgagtcccgttgtccgctctcggatggctggttcaggatgattgattcagcctgaggatgacccgggcggttggcgcagtggtagcgcacttccctgacacggaaggggtcacaagttcgaatcttgtatcgcccactcgatgaatcgccggcagaatgttgccggttttttcatcacaagctcgggcgattggcgcagcggctagcgcacttcgttcacaccgaaggggtcgtaggttcgattcctacatcgcccacccgatatcacgctcgtcagtctatgatggcgggcattttctatatctgccgtgccacggttccttatatggcgtccggcctcgggtggcatttggctgtgagcggtttccgattatgagtggcgtccggccgtcgtgcaatcccgctgcgcgcggtgccgtttgggctgtaatacgggtgctttgaaccggccataacttcttcctatgtcccggggcttgtgtcgtgtgccgcggcgcgcttccatagtggatatggcggtgtggaaggggagccgccatacttacttacacaaggacgtcttggtccgccagggcaacgcgcatggaaaggggtttgcgatggtgtgcaccacgctgaatttcgcggagaaatacctgctgaaaaccgaagtcaggttcgttgccggtatgtccggcggtacttccgatgctggtactgatttcgatgtcgatttcggtggcgagggcgacctcggaagcgatcatgccaccggtttcaatcgctcgctatcggccgacgattattgggctgcagccggatatgccgatgagtcattgtattgatggacgtgatgacgcggtaagggcgcgtcgataagtgcggctggtgtcgcggctgatgccgcatctggtgctcgttcggtggtcgcggctgatgttccgtacggaccgcctgcaatggttttgcatcggtggtgcgtcaaaatccggaccgtcgccgacgctgtggacgtttggcggcgttgaaaggacagataatggattgtcaacgccgctgagaacgattggcgacggtggtgggacagcggatgccccaccaccgtcgccaagagtggtacttgtgtcggtggcgtccaaaacatggcccggcaccgacatcagatactctgaacgtcggcggattcccgttctgtgtcccagcgccgacgtctgattcctgcttatgcgagctggcgtcggtaaaaaggcagaacttggttcaccggcgatgtctcagcacgtttgcgcgcgtcggatccttctggagcagcaggaaaacgagcgccgcgacgagcaggacggcgatggagagcacgccgagcgaggcgttgccggtcagggaggtggtggccaccaggaaagtgccgatgattgaggcggtcttagggaagaaacaatagtgagaccggggaccccttgaaatcattggggaatcatggtggcgatgcatgcgattaacacatgttgttaacacagatgtggaatgaggggggggcgcgtgaggctcgtggtctgcgacgcatgagtgtgaccgtgagctccccagctgatgagcgcaaaggcagagattggtgtcacgcgggacttgtctgccgaagagcggcgattgatgcagggtctgtgcgatgctctgcagcagttgctgaacaagcagtaccagcggcacatgtgggactgttcgatagcctgaaaaattttgccgcagacaatctaggcaatgtgctggcggggatttcaatctcggttcgattggtgatttgccggcggtaatcggtgagcatttcaatgccgatcagttgggtgaaatcaacaggtcgttggcgaccatttgaacgccgaccgacttgacgagctgcaggcgctggcggaggaaaacatctccgccgaccagatcagtcaggtcgctggtgcaattcaggagcagggtgccaatctggacctcggatccattgccgaacaagcaggactgcccgctgacatcatcagccagatttccggactattgggcaagtagtcgccttaagctttaacgctgacggtgttgtctcggctattgcgtgttttgcggtcgctcagcaaatcatatgggtcgtaggtaaccgattgcgagcgctgctgtacacagatgtgtacgtgggtcgaagcggattcgtggtggcaggtgagacaagctgccctcgcatggctggaaaagcttcggtctcgtggagtgcgatgttaaagctgctcaggtcaacggaatggcggaattccgccgatgcaacttgtggttgcgctcgaataaccggcgattgcaacccaaagatggtggcgggcgacatggacggcatgccatagtgagcccatcggccgaacatgacatgataaagattacgtatgaagggacattccaatgagttttcgcgctaacctgcagtacctacgtgcgcaacgcaacctgacccaggaacgattggccatgttgcttggcgtctcgcgtcaggccatttcgaaatgggaatccgaaaaggcctatcccgagatggacaagctgcttatgatctgcgacctgttcggctgcacgcttgatgatctggtacttggcgatgtgagtcggcctgccgcgtcggcttctgcggccggttcgtcgaatgttgactcctcggctgagacggcatcgcctttagccgcttcttccaaaacggcgggcataatcgctcctatcgcggagcttgcgcaggatatcactggctacgatgaacatcgccgccgattcgcgctgctgattgccggcggtgttgctgcgattgtcgccggggttggcatcggcaacctgttcgattccagcaattccattctcggagcgacgccgctcaacgattttctgacgtttctgtgcgtctgcgtgggtgtgattgcggggctggcgatgctgattccaggaggtctgtcgcgtattgacttcaaacggcgtcacccatacgtagaagatttctacaccggggaggaccgcagccgagaattgcggctgctggtaatcggcatcgtcggtggcatctcggctattctgattggcattgcggtgacggtgtatgccgatgacatgctcggcgtctccgatggctggcccaacgcaatttttctgctgctctgtgcgcccggtgttttcgggtttgtctactgcggcatgagatacagtctgctcgatatcaacgcatacaacaaagcggccgaggacgatcgcaaggagcatgcgggcgaacaggatttctatgccagactgaccggcgcggtgtgcggcatcattatgctgatagccacggcgactggcttgtgcctgctgtttttgaaccctgcggcattgcgcggcgattggtcggccgtcgggtcgagcgccgcggacggggcgatgttctggctgccgtggccgattggcggtgtgctgtgcggcgttgcggccgtcgccattcagctgatcaaggattatcgcgagcgtaagtgatcaagtggcgatggtccattgctattagggcccgttgcaggggttgcgagatgtcgcccgcggcgcagagttgccgagggccggcaaatcactcccgcgtcgggtccttttgcaggagcaggaagacgagcgccgcgacgagcaggacggcgatggacagcacgccgaacgaggcgttgccggtcagggacgtggtggtggccactaggaaggtgccgatgatcgaggcggtcttgccgaagatatcgtagaagccgtagtactcgttggcgtggtccttggggatgatcttgccgtagtacgagcgggaaagcgcctggataccgccttggaacatgccgaccagaatcgccagaatccagaactccacggccgatttcatgaagaacgcggcgaagaacacgatgcacatgtatgccacgaccgccgccgtgatcatcactttgcagcc

SEQ ID NO: 3049 - DNA, 6856 bp, Unknown
  R19_24m  MAG No. k141_23314
caagccattgctgggcatctgccgcggcatccagagcctcaacgtcgccttgggtggcacgttgtggcaggatctgccggacgaacatcccagcccggtcgtgcatcatggcgacaagccgccgtatgacccggtggtccacgaagtgtcgatcgcgcccgattcgccgttggcccgcgcgttgtggccgctgggagacaacggcccgagtgaggcggaggccgatgaggtcgattccttcggcaggccgtatcatccgcgcgcctatacgctgggcgtcaacagttatcaccatcaggcgattcgcacgctgggccagggactggaaccgatggccactgcgccggacagcatcgtggaggcggtctggatgccggccaagcgtttcgtctgggccgtccaatggcatcctgagttctctcaccgcgccgatagcaaccaacgtcgcatcctcagcgccttcatcgacgcctgctgacgcaagctcccgccaatctcgacgaaacgtcttccaagaaatggcttgcccgcatccgcagccccctaccacgacatgagcgcccttgacaacgtcaccctcggcatgcgcttcacccgtgacagcaaacaggtcaggcagcgcaaggccaaggccatgctctcccggctcggactcggccatgtcgcgggagacaagatcatgaccctctccggcggtgaacagcagcgcgtcgccctcgcacgatgcatattgaagcccggggatttgatcctcgccgacgagcccaccggcgcgctcgaccgcgatctcgcccaacatgtcttcgacgaaatgctccgcctccagcacgaatacggcaagaccctcatcatcgtcacccacgatcttggcatcgccgcacaatgcgacaacaccatcgagctacaggcggtttgacggagatattccggcagctttggtctaccgaagtcacgtgttgcccttcaatctcctcggaaatctaggtggcccatttttcaaagaatgcgatcggacgtaacgccccgtaaggagacctgcaatatgaaacgttgaatcgtcatctaaagatgacgttttcgtagatcttccggaatcgccagtcatctgcgatccggatatggcaccggtccggctcgatcgagcccggacgaccatggagaaaacgaacgatcgaatccgaacgcgggtaaagagcctgcgcgacaccattgataaagccaaatttaagaaaacagatcagtatgcataagttttacatgccttcagcctcgtcaaccggcagcgggccccagaatccagtcacagctaggcagagcgtacaacatactgcgtagtacatggcgcgaatcccaatgaccaccatcgattgatgacggccacgaatactcgtactcagccttactgctttggctcatttctgttcacttcacgctggagtaccgagacacgttgagcggaaataccggtaattcacgtacggttaccgaccattggcctgaacggtactcagcatccgcagtcacttggggtatggtcatgacggagagccatcatgaccgatctctcattattctgggatgaatccggcgaggctggaactgaatctaaatattaaaacgcatgatgcacacgttgcggaattagtccaccagaacttcggcatgctcggcaggttcagcgggttcgatgtgacgggcacgcatggcatcgagggcggcggccaggtcggccgggtactgggaccggaccgtggtccagacgcgggtgcgaggatggcggaattcgagcttcatggcgtgcagccactgccggtcaagtcccaaagcttcagacagcaccggattggcaccatacatggggtcgccgcacagaggatgcccaatcgaggagaaatgcacgcgaatctgatgggtacgtccggtctccagattcacggataccagtgtggcctcatggccgaaacgctccaacacatcccaatgcgtaacggccggtttgccggccggagtcacgcagaagcggaaatcggacactttggcgcgcccgatcggtgcctcaatggtcgctttgttctctttaagaccgccctgcacgagcgcatgataggttttctttacctcatgctcggcgaactgccgacgcatctcggtgtacgcaaggtcggacttgcacaccaacatcaagccggaagtgcctacatcaaggcgagaaacaatgccttcacgcccggccgcgccataggaagcgatatgcacgccacgatcacgcaacgatcccaataccgtgggaccggtccagccaaccgaggcatgcgccgccacgcctacaggcttatcgactacgacgacatcatcatcttcgtagacaacagccatatcagttgcgataggctcaggcccggcctgttcctccgccaaatcaaattcgacggtctcccccgcctgcaacgtgctggaccgcgcaacttcacgccctaaaacgcgcgcctgtccggagtcaaccagatcggcggctttagatcgtgaaatacccagcattttggccacggctacgtcgaaacgcttacccaccaatgcatcgggagcagggaccattcgactcattacttggcgtccgcctccggctcagactgtagggattcgtcggattgctcgataagatccttgtgggagaacggctcccccataagaatcagaatcaccaggaccacaccggcgactaccagatagatatccgccacattgccaacggaccagccatagttaaggaaatccaccactttgccgttgaggaagccgtcagcgtacataacacggtcaatcaggttgcccagagcgcctgcaaacgcgaaagaaagcgccaccgaccatttcatggagatagtgcgcaccccagccacagcaagggccacgcaagccacaacggccaacagactgattacccaagtagcgcctgaccccatgcccaaggacgcgcccggattacgcaccaaggtgaaggacagcagtccgggaatcacgcgaatggtctgaccgttggataacgcggccatcgcccaagccttggtgagctgatcgacaatcagcgcagccgcggccacacatgcaaagacggccacgcgagtgcgcagccgtccctgttggttcgtcatacgacctgtacctgcctgcgctcagttggtcttggacgaggtctggtcgacgtagttgttcgactcggaaacctgcgatgccagctggccgaggtactcggtgaggcgggcgcggtattcagtctcgaactgcttgaggctctggatgttgccctcgacgaccttggactgagcctgaaggttgtcgcgcacctgctcggcatacgtatcggctgcagagcgggtgttcttgtcgtacgcatcagctgcggaacgagtgttcttgtcatactcggcggcacgctgctgcacttccttctcgtagttgtcagcgtcatcgtgctgagacttggagtagttgtccgcatcctgacgagtcttgacggagtatgcgtcggcctcagaacgggtgttctgggagtaggtctcggcatccgcgtgaatctggtcacggtaagcgtcggcctcggagcgggtacgatccgaataggtgtcggcgtcggaacgagtacgagtggagtagtcgtcggcctcggagcgggtacgctcggagtagttgttggccttggtgaccaaatcgttgtacttgttctggctggcctcggtgatttccttggccttgttcttgcccttctccacgtactgatcgtgcagctgcatagccagggtcagcatggcggtggcgcgctcgggctcggtgcccggcatggaagcgacgccagcgatcttctgcagagaaccggtctcagtgctcggctcgaccttggaaacctgggcacgaagctggttttcacgctgcttggcttcttcgagctgacgagacagttcagcgatctgagcggactgctgctgagcggcggaaccctcctgctgagcagcggcgagctgacgggacagctcctcgttggccgcgcggaactgatcacgttcctgctgaatggcggcgatctgctggccgacggcttcctggttaccggaggcctgagcggcctgggcggtgagctgatcgatttgagcgttcagctgatcgacctgacccttgagctgctcattctgggaggacagcgcgcggttggattcctcggcttcgctgagcttggcagaggcaagctgtgccgcctgatcattgccagcctgagcggcctgctgggcctgagccacagcgttcttcaaaccagcattctccgactggagttgctgcacctgaccggtaagatcggagatcttcgcattaaggttggtcacgtcagggcccagagactgagtggcctgaccgccggctaccgcctgacgtccaagagcctcgacggtttccgtgacctgatcaaggaagtcatcgacctcgtcgacatcataaccttccttgaatcgaacagtctggaaggtatgctccctaatatccttcggcgtcaacagagccataaatcttgcacctcgctttggggcattgcccgcacttacgttggtctcaagtcagaatgctatcacgaccccatcgtttcagaacattcaacgtgggtttttatgccagatatatgcctccggcgggtcaaaaacggcctcagaacactatcagaacaacactttctagtaccaccaacgcaaaatacagcacgatgaagctgacatcaagataaatcgagccgagcggcaatggacgaatatagcgacgtagccagcgcagagggggttcggtaatggaatacacaatgttgatcagctgggccaccacaccacgtggataccagtttcgtgcgagaacggagacccagtccagaatcatgcgcacgaacagaaccgtgatatacgcgttgatgagccatgcaagaatgcggccgatcagagagaacactaaggaaagcatgctgacagactaacaaccgcgcatgaaaagtttgctcggagcgcaataagaatcggccgactccttgctgggagtcggccgaataccgatataacgtcgaatgcgaaaactactgaaccggtcagtcagcgaacaaatcgtgggacgaggttggttttgtcggctcttcgaccttgatgttcacctgcgccgggctcaacaggaacacgcgcggagtgacacgctcgagggaaccacgcacgccgaacaccacgccggcggagaagtccacaatgcgatatgccacggcttcggccacaccggtgagattcagtacgaccggaacaccgtcacgcaatgcgcgaccgaccagctgagcatcctcatatgacttcggatggatggtggtgattctgttcacacggccaccggggaacggcttggtagtcgacgatgcggcaggcgcggtggttgacgccagcggcgtgaccgtatggtcggaatcaaatgcggacttcgaagccggcttctgctcctcgtcctcctcgatgtagtcgtcctcatcgtccacaacgtcactcatgcccagataggacatcgcgtttttcatgaacccagccatggatcaatcctttcagcgcaggaaatcaggaatgtcgagatcgccggcgggatcgttcacggcgatgttcggatgcgaggtagtcggatcgtcaaagggcagggatgcggagtcaccgatagccggtgtgaatgccggttgggcagtggcagcgggctgtgcagccggtgccggtgctggagctggctgtgccacgggagtcgcaggatcggcggcggttggcacaaccggcgtcaccgtgctctgagtgtcgtcatcttgagcggcgacggggtcaaaaccagcagcaataacagtgacacgcacttcatcgccataagcatcgtccagagcaagaccccaaataatctgggcttcagggtgaatcgccttgcgcaccagttcggtggcagcagaggcctcctgcaacttcaggtcggtcggaccggcgatgttgatcagcgcaccgtgtgcgccttcgatgctttcctcaagcagcggagagctgatggcgatttcggcggcctgcgtggcacgatcctctccccgtgcggaaccgataccaaacagcgcagtaccagcaccacgaagaatggagttcacatcgttgaagtcgacgtgaatataggagttcatcgaaatcaggtcagtgatgccctgaacaccggcaagcagtgcggtatcagcggtcttgaaggcctcaatgatgccgatggaacggtcggaaagctcgagcaggcgatcgttcggaatgacgatcagcgcgtcgacttccttgcgcaggttgtcgatgccgtattcggcggaagcggaacgctgagggccttcgaagctgaacggacgagtaacaaccgcgatggtgagagcaccctgttgatgagccgcacgagcgacgatcgggctggcgccagtaccggtgccaccgccctcgccgcaggtgacgaacaccatgtcggcacccctaagcgcctcttcgatatccgactggtggtcctgggccgccttggctccacgctccgggtcggcaccagcaccgagaccacgactggacttatcggaaagggaaatcttgacatccgcatcagagcgcagaagatccttcgcatcggtatttaccgccacaaattcaacattctgtaatccctcggcaatcatgcgattgacggcattaccgccggcaccgccgacgccaacaaccttgatgttggtcttgtcgttgaactcattctgcgcgatctcgctcacgtttggctcctgtcacttcacggttacacccaagag

SEQ ID NO: 3050 - DNA, 23997 bp, Unknown
  R19_24m  MAG No. k141_23328
aggttcatgatggcgaacacatgcgtgccgcgccaggcgatgaggccgtcttcgtcggacttcttcggtccggcgcagaacggacattccttcgacttgggtttggtcggacgatcctcgctgttgcgcagcacataggtcatgcgctgcggggtccacagtcgtacgaccgtgtcttcctgaggtgggaagtccgccggatcatcgacacgcacgtcagccatcatgtattcctttactcagctacagcggcgttgaagtcgtcggcggagttcacctggacgcgcttcttgatgacggtgaggatctgctcgcgggccttgtccaccggaacgccgttgagctggctgccgtcacggaagcggaagctgaccgcgttgttgttcatgtcttcctcaccgacgatgaggatgaacggcaccttggacttggaggcgttgcgaatcttcttgccgaagcgatcgtcggagtagtcgatctcgcaacggaccatctcgtcctcaagggacttgacgaaaccggccagatgcggggcgaactcgtcggcaaccggcacgccgagcacctgcacgggggccagccacgccgggaaggcgcctgcgtagtgctcgagcagcacggcgaagaagcgttcgatggagccgaacagggcgcggtgaatcatcaccggacgctggtgggtaccgtcctgcgcgatgtactcgagctggaaacgctcgggcaggttgaagtcgagctggatggtcgagacctgccaggtgcggccgatggcgtcgcgggcctgcacggagatcttcgggccgtagaaggcggcgccgcacggatcgtcgacgagctcgaggttggattccttggcgacctcggcgagcgtgttggtggcctcctcccagatctcgtcggagccgacgtacttgttcgggtccttggtggacagctcgaggtagaagtcggtcaggccaaagtccttgagcaggttcagcacgaaggtcagcaggctggtgagctcgtctttcatctgctcgcgggtgcagtagatgtgggagtcgtcctgggtgaggccgcgcacgcgggtcaggccgtggacctcgccggacttctcgtagcggtacacggtgccgaactcgaagaggcgcagcggcagctcgcggtaggagcgctgacgggacttgaagatcaggttgtgcatcgggcagttcatcggcttcaggtagtagtcggcgcccggcttggtgatgttgccgtccgcgtccttctcctcgtcgaggtgcatgggcgggtacatgccgtccttgtaccagtgcaggtggccggaggtctcgtacaggccgcccttggtgatgtgcggggtctgcacgaagctgtagtggtgcttgcggtgcatctcacgggagtagtcctccatcgcgttgatcacggcggcgcccttcgggtggaacacggccaggccggggccaatttcatccgggaaggagaacaggtccatctcggcgccgagcttgcggtgatcgcgcttggcggcctcctcgagacgggtctggtaggccttgaggtcttccttggtggcccacgcggtgccgtagatgcgctgcatggtcgggttcttctcggaaccacgccagtaggcggcggcggaacgctcgatcttgaaggccttgatgtagcgggtgttcggcaggtgcggaccgcggcacaggtccttccaaaccacattgccatcacggtctacgttgtcgtagaagctgagctccttttcggagatctcggtggcggcggccgggtcgaggtgtgcttccttgtcttcgatcagttcgatcttaaagggctggtcggcctcttccttcagagcctcttcctcagtcacggaacggcggcggaaggactgggaggacttgatgatgcgctgcatgcgcttctcgatgtccttgaggtcgtccggggtgaagggctggtcgacctggaagtcgtagtagaagccgtccttgatgacggggccgacgccgagcttggcgttcgggtagacttcctgcacggcctgggccatgacgtgggtggccgagtgacgcatgattgcgaggccgtcttcggagtcgagggcgatggggtcgacggtatcgccatcgttcagcggcgtgtacaggtcacggttctcgccgttgatcttgaccgcgatgatgttcttgtcttccgcgaacagttctacgccggtggtggttgcttccacctccttcgcttcgccgttgacggttatggagatggtagcttgcgccatgatttgtcctttgctatcggggcccacggtactaatgtgcaggcctggactggttaatcaacgtaggacacgataggttgggcgtgcgacaaataccaccagcatctgaaccaatacgaaaaaaacctcgccgaagcgaggtttcgttgtggagcggacaacgggactcgaacccgcggtctcaaccttggcaaggttgcgctttaccaactaagctatgtccgcaaaggaatccgccgtgagaagcggaatccagtgggcgatgtaggaatcgaacctacgaccccttcggtgtgaacgaagtgcgctagccgctgcgccaatcgcccgaatactcggttcttcagttatatccagtcgaattgcttcgactttcgtgggcgatacaagattcgaacttgtgaccccttccgtgtcagggaagtgcgctaccactgcgccaaccgcccgggtcatatttcatcccattgaattgcttcgctggtctgagaggtgggtacgagagtcgaactcgtctatacggctttgcaggccgctgcctaaccgcttggctaacccaccgtaaggtctgtcaactcacggacctagagcggacaacgggactcgaacccgcggtctcaaccttggcaaggttgcgctttaccaactaagctatgtccgcgtgtgtttccttggcgaggtctccctgccgaagcacgagtgtttactatactcacatgcgtgtagttcgtccagctgcggcgtgtcgcctgtaattgcatactctcgcttatggctaaagcgtgcgcttcgggcaatgaattccagttactctagaggtatgagtgaagcagcgaaggacaccggcgcagtattgatcgccgcattcgagggatggaatgatgcctgtcaggcggcgacgaacgcggtgcgccatctggtcaagcgatatgagtcccgcgagattcgtcatattagatgtgatgatttctatgactatcaggttgcccgtcctatgctgtgccatgttgcgggacgcaccaatcttatctggccgcagaccacgttctacgacatcacgttggacgcaggcaagcatatctatgcgcagatcgcccccgaaccgaactatcggtggaaggaatactgtagccagagtctggccattgccgatgagctggatgtcaatcggatcattacgttaggttcgatgttctccgattgcccgcatacccgcccgttgcccatcgccgtcagcgacggagactgtcaatgcgaaggagaccggtcgtataacggcccggtaggcattccttccgttttggatgtggccgccgcgcagcaaggttttgctcattcctcgatgtgggtgtccatcccccaatatttgggcagcgacgaatgttctgccggcactatgcgattgctggatgcgttgggcaagcatatcggcttcaccttcgatacggcagatctgaagcagaaagccgaacagtggaaggcgcaagcctcgatactggttcgttgtaatgaccagcttcacgattacgtggagcatttggagcacgactacgacttgcagcagaaagccgaggcggaggcttccttgggagcgccccaggccgaacaactagtcaaagaagcagaagcgtttctgcgccagatgggcaattagcccatatatggtgtgctcccgctggatgaacagccctgtgggctgttcatagcagtgcaccatgtgcacgtcgcacaaaatgtcgggagctggctcgcgtagcgagactgagggtggttctgctggcatattccagtgaccacccccagtcagcttcgctgacggctcccgccagcgggagcaccattatattggagtcgtctatcgacccgtcttatgccgcagccgccacggagggatcgatggccggcagcacgcccacaatcagcagcaaggcgacgaccacagccaaaccgatgcggtagatggcgaaggccttataggagaagttcgatacgaacttcaggaatccgatgatcacgatgtagccgagtacgaagctgatgaccatggctacgagggtcggcccccagccggggaacatcgcatcggttttgtagttcttcacggccttgatggcttcgagcaaacctgagccgaacaccgcggggatggccatcaggaagctcagacgtacagcggcctcacgcgtgtagcccagtgcgcgaccgacggtgatggtgccgccggagcgggacacaccaggaatcagcgccatggactggcccaaaccgaagaggaacgcatcacgatacgtcatatcattcatggttttgttctggcgagccttggcatccaccatccacagcagaatgccgaataccaacagcacggttaccgtaatccacaggttgcgcaacgaggtctcgatgacgttctgcagagtgaagccgaggatgataatcggaatcgagccgacgataatgttccagccgagtgtggcgtaattgtcgccgcggcccatgcgggccttccaatccttgccgttcttgccgaacaggcagctgaaccagtgagtaaggatattgatgatgtcgtgacggaaatacagaatcaccgcaagttcggtgccgatttggatgatggcggtaaacgccgcaccgggatcagagcccagcatcaaatcgccgaaaatacggatatgcgcgctggaggataccgggagatactcggtcagcgcctgaacgatgccgagaatgatcgcttggaaaaaattcataacccctcgtgatttctaagtatttgatgtgttatgacgatgaacaccctacccaagggggtgtagaacaacactaagaatcggtaacatccacggcttctacaatgaaagtggatatagtacgtaagcgacgaagggagcattatggccacgtatcgcaaaagcagggcattcgcaccggaaggattcttcgaatgcgagggtcgaggactcgaatggttgggagcggctcatgcgcagggcggcccgcgcgtggtgcaggtatacggctggggcaaggattatctggatatcgaacgtgtgggcagcgcgtcccccacgcctcaggcggcacgagcttttggtgcggctctggcccatatgcatgatgtgggtgccgaatatttcgggtctgcgcctgacggatataacggcacatgctatttcggaccattgcaggacccagtgaaaatggataccggcgagtggaccgacccgatcagctatttcgctgatggacgtctgcgcccgatggtcaaccttggtgtgaggcgtggcgagctggataagcgcgatgtcgaactgaccgagcgcgtgattgaagcgttgccggatctgatgggccgagccgcgtccgacaagccggcgcgcatccacggtgatctgtggagcggcaatgtgatgtggaccgccgattccgggcagcccgaggctgtgctcatcgacccggcggcacatggcggtcatcgcgaggaggatctggctatgctgcacctgttcggcatgagctatctgagcgaaatcaccgagggctaccagtccgtgcatccgttgaaggccggatggcaggagcgtatcacgctctggcagctctaccccatcgccggtcactgtgtcttcttcggcggcggctacgtcaacgaataccgctccatgtgccgctccctgctgaagtaacagacttggctcccctctctgaggggagccaagaacgcatccactctcagctcagcgcgtccttcaacttgctgaagaaccaccattcacgggaatggcgtgattccaacgtttctgagggtttcatacgggctccaaaatgtttttgcccacattttgcccacatttttccatgcttgtctccacctgcaccgcagcatcgagcatacgggcaacatccatcaaatcgctgtcgaacagatccgcgtacacatccaacgtcatgctcgcgttcttgtggcccagcatcctctgtaaggccttgacgttcgcgcccgcgtgcacggccagcgaggcggcggtgtgacgcaggtcatgaggcgtgggccattcctccttcggccagcccaggcgcaccagcgcgtgataccaccagccggtcgtcttcgccgtgctctgcttcatgatcgggccgccccgcagatcacggaacaccctttcgtccggttcgcgttccccgcatatcggtttcagcgcttccatgacgatgagaggcatgggcacgtcgcgttcctcgctgttcttcggagtgtcctcgacccatcgtgccccgacgtacacgaggttgccgcccacatgcagcactccccgaccgaagtccaggtcacgggccttcaacgccgccgcctcgccccagcgcaacccgcagaagcccaatgtcagcacgagcgcccgccgctcctcccccagatgctttcccctggcgcattcgtcggcgaatgcgagcagccgggatatggtcaggtacacgcgacggctcttgcgcctcggcagcttggggagttcaacgttttcacaggggttgtcgagtatgagcctgtcccgcacggccatgcggcagatgccgagcatggtctggtacgggcgtctcacggatggagcacccgagttctcgatgatgtcgctgatccatgcctggacttcggcgcgggtgacggtgccgatccgacggtcggcccatcgagcctcgcagtggagcctccatgcgtcggtggcgttgatccgcgtggtctccttccaaaacggccatttctccttcagccattgctcgtagaggtctccaacacgtcgtttgccgtcctccgggtcaacatagctgttggtggccttggcaatggtgacatgctccgccgcccacgtctccgcgtcgattttgcgcttgaatccgcgcttgtcggtctgcgtgccgtccggcttgcgatacctcacacggtatctggtttcgtctttggttgtcttgtatctggtgacgttagccattttattacctgcttaataatggaagattcacgttttaaccggttttaatgtgatttaatgggactgttgctgaattgaaccaaccgaaaggcaatcgcgcatgccgatcgtatacccatcgatgaaggcctcggacctgttccgtacccttcgtggtctgggatacgggattgaccgcgcgaatggttcgcataaaagaatgaaggcggagggtcgtccaccgttgacctttgccttccatgacgggcagactgttccgcccggactggtaaagaagacactggtgaaggacgtcgggttatccgaagaggagatccgcggtatcctcgggcagaaatgaagaggcgcaacatggatacacgacaggtgaacatcacctatcacagggaagacggcgtatggtgggccgaatccgatgatatgccgggattctccgccgccggcgacacgttcgccgaaacccgcaagctcgcacgcgaggatataccgttctttttcgatgacaacgagcccaccaccattcgtgaatttttggacaacgggactgaagttgttccgaacaacaccatcttcgtgtttcccaccccggagctgatgaagaacggcggcaaaggcgagtatttcgaaccggtcaacgtgtccaccaccgccaaccaggggcatcgaagaacgcagaatggtggcctgacatatgagtgaggtttctgaacgcgcgtcgattatcgtgcagctcgccaatttcgccgccgtggacggttccggtatggggaatgttcttggctccggtgccaatatcttccccctcacgcccaatggcatgacgccgcgattcaccgtgttcacggagatacacgtgccggcggatatatgcccgtgcgaggtggccgtcgaatactccctgcgtgacgagaagggagacgtcgtcgaggttgccggtccgatgccccaatccttgcgtatcgcgaacatcatgacgattgatgcgggccttgctggactccccctcgaccaaaggaaccatatcggtgcggtcagtctcggaacactggatttctccaacggactcgcactcgcgccggggaattattcgtggcgtgtgactcttgacggagacgatgagcatgctgcggaacgattgttctgcgttcccaagcctgtcacccctcctgtatttgggtaaatctgacatttcgggtatggcttcgccccgtgtaggatatggggtgaagcgtcctcctttcttgaactagctggattcttcaaaccgccctgttggcgctgcaacgccggcagggcaattctttttaattggtcgaatcatgtagcgacggtgaatcgatgccgcagaaaccgagtgctatgtggttgtaatcgctgacgtcaaccttcaacccgtcaacatcggggttgtctttccatacgttgttcaaatcgccgttggcgtatttccaatccttcgccatcccgttgagcgggtacgtcgtcccgtcgattgtcatgatgacggcgttgtgatccttgcattcgacggtcgtatcgtccgccgaccaaggccagtattcttccgaatacccataatcgtcaatgaatgactgtttgctgagctcatgcgatttcgcggatccgacgcaagctgtcagggatacaactattgccgcgcttagcaggaacataacggcttttttcattgcctgctctttctctgtcgcaatgccatggttcggctggaatctattcgttagaattccacggctgggtcttgtgggatttccacggtatagcgttgcccgttgatggtggcggccgcgctttccacctgaactttcttcgcggtgggttgccgttccgcttccatggcgacgtatgcggtgacgatgcctgtcttgccgggctccacactggcattgttgctcatcgacatgctgtccacgacattgtcgttcgcgtcgaggtaccggaagtcgaggatgatgtcgtcaagggttttgttcgtgtcgttgcggacgatgtattcgaccacgcgggtgccgcttgtgtcgcgcacgttcctctccagaatagtcaggcccgagctgccttcgttggcctgcggctttagttcgtccacctgctgctggagcgtttccacttgtccgctgagctcgttgcgctgctccgtcagggtctgcgccttcgcctccgactgtgaataagattcgcgaagattgtcgatgatcggggtggtgtacaggtacatgccgccaatcccgccagcgagtccgatgaccagtccgatgaccgccgtgatggcgatgatggcgggtatcggaagtttcttcgctgccgggtgtggtgccggagatacagtttccggctgttcgtcttgtggtgccggtggttgtgccgacatgggtgctggctcggtcattatttcttctttcttcagatggctacgctatcgtgcagccattgtttgtatgccctgattatccatggcattacgctcagttctcttgctattgcgcattcgtcgttgccgtacaggatttcggcagtgacgtagtcggtctggcttatgagcattttggcggcttcaacgtccgcccgctgctccgtgtaggcatcggtcttgcacccgatgtcgtggtgcttggcgtgactaatctcatgcgccagcacgcaccggcgctggacaggcgagagcttgtcgctgagaatgatctcgttatgctccgcgtcgtacacgccttcgagcttgtccggtagtggccggtcgtgtattcggctcgcccattgcagggcgatgtattccaaagcgtcctcgctcatggcatctcctcataggcttcctgctcggcctcaatatcaccatgcttcgcggccatggacagccagtcaggctccgaagtagattcatcaacaacaaagcgctcgccggcggatttctttgtcgttgcggtttgttgttcgagttccatgtgtcttgcctcggtgatgatctcacgcagggtttgcaccgggtcggcgttgcagacctcgcaaatcagcaaaaactctgacaggcgcaccggagatttctctccattgtggatatatccaatccggacatggcttactactccgcccatgcgttcggcaattaccctatatgccaaagcggaatcatcgatgattttcgccatcgcattctttgcggcgtaatccgctgctgtccattcgatttttgctgccatggctcaaacatacgtgtaagcatgtggaaacacgccgcacttgctcaaattgtaagcgttagctaacatgagttccgtaatcacgagcttacagcggaggtggttgagatggcccagattgattacagggagcttccggtcagggagctgtatctctacatgaatctcgtgacgggtttctgctccgatatgcgtcgcctgttgcgcgaggggaagctgaccgccgatgcgattgccaagtacgagatgacggcggtcaacaacctgattgccgaggtcaactaccgatcgcaggcagcacctgagcgacggtcagaccgtacaccgcagcattcaccccgacctgagcgataagaggaaccatgaactgctcattgaacttttcccacacgggatgcttcttcgtttttgtttcggccactcgtaatgcgttgcacagtcggtcgaacgccaccgacagcttgaagtcgccggtcagctcgtattcgtccaacgcttcgcgggcttcgcgaatcaaccgggacaagtacgccagcaagtcggagggcagactgtcatccgcacggacgcatttgacggcttcctcgatcatgttcctcatcttttgccgggcatcctcggagtacgagacggtggaagccgatagtttttcggctacggattgcagtcccatgagatcgccgtcggtaagtttctcctgcgttttcgcatgggtgaacatcgacatgtcccaccgcagctcatcaatgtccatgaacgtgtttaatgccgacttcttccaccgttcaaggcatgacctcatcagatgcacatccacacccatggactcccatgagtcaatcgctgactcgacttcgctgagggcttgcacgacatcaggaaaccgatacccctgcctgtcggcttcgtcagtcgtcccggcttcgaagaagccaatcagatactcagccgcattcaccataacctccaaccagtcaaaggagtcaacacatgcctaatctaccagcagttgaagccacgaaacgtgccgtgcacgacacccgcacccgcgtgctcctgtccaaaaccaaaatgaccagcatcgccgaggcctgcggccgcaaccgcatgaccgtcgccaaatggctcgacggcgacgacatcagccttgcagccttcatcgccgcacaacaactctcaggcggcgacccactcgaaacactcgccaacgcgctcaacgccgacaacaccgatcccgcgctcgctgccgagaacaccatcccagcgctcgccgaaagcgaggtgaagtgatggaagtccgcgacatgtacaggctggccgttcggttcatcgggtacggcgtgacgttgctgttggttggcggggcaatcgccgtgcacctcacggggtatgtgatggtgcacgacgaaagccttatggaacgaatcgaggaacagctacgtcagtagatacgccccacccgctgtggctgcgactcgtcgacgaaccagtacggaataacggccgggttgatcacgaggctcgtatcggccgtggaattcgacgaacgccgtaccgaggtctccaccacggcaccggttttggcggcttccgaaagatcctcaagcagatccttgacatccacggaatcggcaagaagccaaatcttgtcctcatatcccaaatgcaaacgattggtcatttagttttcacctcctctcaaggctggtagttaggcaatacccagcttaggggaggtgagccaacacataatccaaggaaaggaacctcatggtctggttcatcatcgcaatcatcctcctgctcatcggagtcggcatgatcgccgtcgccctcgccaccggcggcgacggcgcgaccctcggctttgtccccatcgtcgtggcgggtctgctgatgattcccgcatgtctgtattcgcaggacgcgggagaggtcgttgtgttgaagaacatgggcggctccatcgccggctattccgccgacgcgggattccacggcaagctcccgtggcagtccaccgtcaaatacgacacccgcaacaacgtcatcagctacgtggccaagggcaaggaggactacgacggaggctccgcacgaggcccgcaggtcaccgtcaacgacaagaacggcgcgcaggcggacatcgacatccaggtcaactattcgctcgacccgaagtacgcgatggacctgtacaaggactacggcaagcagaccacattcgtgaaatcggtggcagcggtggacgtgcgcagcgtgccacgcgaggtctccggccaattcgacaccatccaattgttgaccgaccgcagcaagtacaccgccgccatccagaaggccctgaccgcgaaatggaagggcatgggtctgcgcgtcgaacaggtgtcggtgcaggaggtccgctacccgaagtccatcacctcgaagtacgcggaggcgcaggccgccgagatcgacaagcagaaggcgttgaacgagcaggaggtcgagaagaccaaggccgagacgaaacgcatcaaggcgcagggcgaggccgacgcgaacaaggttttgaacgattcgctgaccgacaacgtgctcagacagcactacatcgacgcattgcagaatgccgaccagctgatcgtcacgcccgaggggtccaacaccctcgtccaacccaagtgaggcgaaccatgaacaccaaggaatacggccaccacgcgtccggctatcgcaaggccgacggcggcccgtcgaaacggttcatgcgcgggctggcaatctgcgccgtcgcgttcgtggtctgccttgtctggctgatgacgcacttggcttgtgccactcccctcgccaacggtgcctgctcgctggtcgcgttcctgggagtccccctgcggctcctgtgcctcgtggcaagcgaggcgggagtcgacgaataaaggcttgccggggttcttccttccccggcaatcgacaaggacagtcgctaacaccattcgcgtcgcaccccatccccagcgggtgcggcgcacggggccggcaggttcgcccccgctggagatcgcggtgtcatgtacgcgcggcaaacagcgggaagccgttcgattcggcacggtccacgcccttcggggaaagaaaaagcccacgcggcaacgtgggcgaagcaaaacagctacaggagaaaggataccaccatgagcgccatgattccgcccgacatcgtccaggacggcgtcgcctactggaaggcagacaaggtgagcgcctatttcgggggttcgcccaccgtgggcacgctcggcgtatggagataccggggcgaaggcccgaaattcgtcaagctcggcggcaaacgcgagcaccgcaaacgcgatacccgccgcgtcgcctacccggtcagggaggtgatcgcctggggagaacagaacgggctccagcagcagacagtggccgcatagagatgtggtgccccatcaccgatgagggcatgtcatggcctccggccgacctgatcgaggagttctgggacaggatatgcgaccgcaacagccagacggccaacccgtacatctacctgctgccctacgcggagcaggtggacgtggaccgtcaaaacaggaaagtgagcgcgctggtggaatacgcgtccaaagccgattacagaggaggaaaaccgaattgagtgagaccaaggaaaaaccggagcgatccaatgcggcggatgtggcggagagcctgctgctggcgttggacgcggggccgaacaagccctcattgccagtgttggaggcgatgctcgccgaagcgctgaaggccaacgacgtgatattggtgcgcgccttcgcccagccgccggcaccgcccgcacaatccaagacgtccgatgtggaggccgagctggccgatgcgcgacgtgaactcgcgcatgaggcgtacggcgccgcttccatgctcgcggacggcgtgatggacgacgccgactgggagctgttcgatttggcggacgaggtgcgttccgccgccgttgccctgctgcgcgcgttggacggtgatgcgtgatggccggggagagcgctctcacgatcatcggcaacctgaccgccgacccggagctgcgcaccacgggcggcggcgcgaccgtggcgagcttcacgatcgcttcgaccccgcgcaactggaaccggcagaccaaccagttcgaggacgggcaggcattattcatgcgctgctccgcgtggggcgacatggccggccattgcgtccagtccctgaagaagggcatgcgagtgatcgcccagggccgactgagacagcactcgtaccaggcgcaggacggctcccagcgcacggtcatcgacatgaccgtcgacgagataggcccctcattgaggtatgcgaccgccgctgtcaaccgtgtccaatccggtcgcggctattccggtggctcgacctatggggatccggccaaacccgccaaccagcaacaaggctggcagaacggttccccggcccagaaccccggcatgccggaaggtgacccgtgggctcagccggcacccgcctctcctggcgccacgttcggcgcttccaacgatttttcatcagacagccaagaccccgaattctaaggagattcaatgtcacgaaagaaaaagaccgatggcgtgcaggacgcgctgattcccgacgagatcacgccgctcatgttgctcgccctgacggccaaggcgtcacgcatgaaggacgccgcggccgcgttccgcatcgcggccagcaagatgctcgacctggccaccaaggatgaatacatcgagaaatacaagaacatcgaccccatcaccgatgccttgtacgacgcctgcgatctctcgcagcacatcttcgacgccgccaacgcggtcaacgacctcattaactatccggtcgaggcccgcgagcgtgtggtgaaggcggatatcgagcgcagtttgttggatccgtggcgtgatctgcccacgtctggtgtggatccggataccggtgaaatcaaggaggactgaatcatgagcaaacgcaagcacggacgccagcaactggagcatgagcgccaacgccggcgcaggaagcgcatgccgcacctgcccgtacaccagaatctatcgatcaaggagcagtgacccgattcagtggctatcaacatcatcgatatcaacgtaaagagcctcatcccgaacccgaacaacccccgcaaagacgtgggcgatgtcaccgaactcgccgacagcatcaaggagcagggcctgcagcaggcgcttgtggtaacccccgaccatgaggagcacggcgagcgcatgtttcgtgtggtgattggtcatcgtcgtttggcggcgtgcaagctggctggcattgagcgggtgccgtgtgttgtgcgtgagttggatgcgaagaccgagcgtgagctgatgctggtggagaactgccagcgttccgatttgacgccgttggaggaggctgacgggtatcagggtttgcttgacctgggtgccggtgtgggtgagcttgcggcgaagacgggccgttcggagtcgttcgtgcgtggccggttgcggatcgcgcgtatccccgccgatgtgcgttccgggtcggaggcgttcgctcagttgtcgctttcccagttgggtgatcttgcggagttcgaggcttatcccgacatgatggctgagttggcttcgatggcgggcaccaagaactgggattggaagcgtggccagctgcggtcgcgggttcgcgtcgaggcgtggcagcagagcatgagaacagcgcttgaagctctgggcctgactgtggatgtctcggcttcgacgtggacgacgccggagggctaccggttctacgacgtgtggagcggcgagcccgacgagttcgagaaatggtatgggcagtggcgcgagaagaacccgtacggcgggccggtgatccgattctccgagcgcaccgtattgtgcttcccgcaattgtcgcctgaggagatcgccgaacgtgacgccaagagcgagcggagggaacgggagcaggcggcattccaggaggcgctggccgcccgcaaggaattcgacaggctggcgtacacgctgcgcacggactggatcaggaagcacgccaccggattcaacggcggccagttgcgcaaggccaacacccgtctgagcctgctcgcgctgaccggcaccaacctatgcgacggcctgatcgcaggggccgaatggaacaacctcgaccacgtgctcgacgcatacaacctgctcgccgccacgccgctgccatgcgacgacacgagcgataggggactgtggcgcgaaacgaacctcgcggaactgcaccgccgccagcacgtcgagggagccgcgaacagggaactcctgctcatcctgtgcgcccagatcgaagcactcatcaaacccggcacatgggccgacgagtgcgacatcaccatcgcccaagcctactaccacacgctcgcagacctcggataccccaccagcgacgaggaaaacaaggcactcaacgggtgtttcctgcccgaagacgacgaggcgtagtgagccatgacatggacccagatagacgacgggctcaacttcagcccgcagaccatgcccggcacggtatcaaacgccgcgttgggcctatgggtcagactctgcgtgcacaccgcgtaccagctgcgatttcccgcattcgacggcgcattcgacctcacggtcgtgcgctcgctgaaaggcaacgcacggcaggtgacggaactggaggccgcgggaatgctcgaaccggcgctcgccgccggccggtggatggtggtcgaggccgacaccctgatgaaattcggcggcacttccggcagcgaactcaaggagaaaagagccaaggccgggcatgccggcggcgtcgcttcgggcgagtctcggcgaagcaaacgcgaagcaagtgcttcaagcaaaccgcgaagcaagaccgaagcaaaccatgaagcaaaagacgaagcaaacggtgaagcaaaaccgaagcaaacgtctgaagcaaaacgaagcaattgcttcgaagcaaacgaagcaaccggtcctaacctaaccatacctagccttacctcccctgtagccccctccgcaccgaacgccgagccgagccaagccgtggccgaatccggccacgccaggccggtgccgagcctcgccgaagccgaggccttggccgaggccgacccgttcgcgttcgcctgggaccggtacccgagccataccggcagccgcgaccaagcccaaaacctgtggcaggccgtcaccagcggcagcgacccgaccatgccccaggccgagccgagccagctgctcggcgccgtcatccgctacgcccaggccgtgcgccaggacggcgaccggttcgtgccgtcgatgcgcaaatggctcgaaaaccggcaatacacgcaatggctccaaagcgtgccgaaacgcaccgaatggggcggcgtcacccgccaatggctccaaacccacgccatcagccaagtccccgaaggctcgtggacggacagcgtcgaacagacgttctgggcccacgtcaaaaccggcgaagagccggagaccgtggcgcaacggctcgtgacggaaatcaacgaaaggcatcaagcatgagcgaccaacccacagctgcgaccctgcgcctcgtggaaggccgtgaaaacaaccggtgcatcgtctgcgaccgatacctacgcggcggcgaatggcccggtagcagccaccaccaccggaaacgccgcagccagacatacggcgaccccgaacggcacagcccctcgaacgtcatcgacgtgtgcggcacggacaacagcaccggatgccacggatgggtccaccagcaccccgaacaggcccgagcattgggctacctgctcaaaagctacgaccccgagccaagccaagtgcccgtgtacagctgccggcgcggctggatactgctcgacaccgacggccaatggcattcatgcccgccgcccgagggaatgcccaaccacccgcaaaccaaccgataaatcagcagaaaggaacactcatgatcaacgcctacgcggtcaccgtgcccggcgaactcgacaacgtggacttcacccgagaggacggcaccagcgtgaccatgctcatcccgcccgacataccggtgagcaccaggacaatcatcatcccgcagggcttcacccgcgaggaaacccgaaccatccagggagccatcgttcaggcgctcgccggaaaggagaagacgctatgatccccgagaaacccgaagccctgctatggatggacgtggagaccaccggcctcgatgcgaacatgtgttcgatactggagatcgggttgcgctgcaccacattggacgcgatgcgagagcacgcacgcctcgaagcggtcgtccacatcagccgggagaccatgctctccgcgcaactgcccgccctcgacctgcatctgaacaacgggctgctcgcccaatgcgagaccagcgaccccgcccactgctcgccagaggcaatcgcactggaaaccgtgagattcatcaaggacatgagcggcatgtacacgctgcaccccgcaggcacgaacatccaacgcttcgacctgcccatgatcctcagattctgcgaacccgtggaacgcgtcaacgacctgctctcctaccgggccttggacgtgaccacgctgaggctcgcggccaaggcgcttggccgagacccctacacgcacagggccaggcccacgcaccgggtccacgactgcctggacagggacatcgcggaataccggcactacctcaccctcatgaaccccaaggagaccgtatgagccagagatgtactccacgcgggcccggctgctactaccgttgcccgatttgcggtcaatggtggcagtacgacccgctaaccgaattctgggatccgataaacacgctcggaatgttcttctcgcaccactcagtgtggaggcaggaacgccaacacagaaaggcaaatcatggccgaaccgattgacctcacccaacaggcattgacggcgctcgccgacgcgggactgggcaacgagtcggcggccgaatcgttcgtcatcggatatcaggcgggctatgacgcagcgctcactctggccatcagcatagaaacccatctcaactcgaatgagccgacagacgaagaaatcgagacctgcgcccgaggattcttcgagggaacacccggcatcaccaactgggacgcagtcagcgagcactcaaaacaagcatggctgcacgcggccaagaaagcgctcgccgccgtcaacacgatgaaaaccgaggaggaatcatgagcatcatcagcaaggaagcgtgcttccgctaccccaactgcacggtggacgacgtgcacgacacgttggcccaggtctacaccagtgacgacttgcaggaggcgtacatgaccggtgcggaacgggagcccaccggcttggaggtggaagccgccgccgaacagctctactactcggactgcaacagttccggcctgctcctcgactcagactggaacagactaccggacggcaacaaagccatctaccgcaaccgggtgcgcacaatcatcacaacaatccagaaaaaaggaacagcagaatgaacgagaacacgaacctcaccgacatcatcagcgcggcgctcgccgccggatgccagatcagcgtgaccatcactcccaaagacttctacaacgaatcacaggagccggaggaatgaacgtgagcgaaagcatcgactggcggcattccacgccgggagagcttgacctgcaccggttcatcggactcacgaggagaggccaaacactggacggctatctctcctgcttcacacagaacggccggtggacactcaccgacgccgacaatctcgccaccgtcatcaaaccggacgccaacggaaacccaacactcaacaccgaactcttccgctccatcaacgtactcaaggaaataagaccatgcaaaaaactacattagtccaccacagaactacattaaccaccaccggtttttacattagcgcgctcgccggaggcacccgaggatgcgcggaaactggtcggtggaatccaccatcggactcctgttcaccatcatcatcgcgatactggcgctcgccatcgtatccgccatcggcctggccgcgtacgccgcgatggacaccggtcccagccagcgtatcgtgcagcaggtggagaccacgggcgatgttcgccgcctgtgcatcgaggctcgaaccggcgagcgcgtcgatgccatgtcatgcgatttgattgatccgcatgcgggaggtgttgcgaagtgacgagttaggcgatacgcgacaaggtgctcgcatggcatgggcgcggctacggcgcgacggatacggcccgtcaattgggcctgccgttggaggaggtgcgcgcgatcatccgcgagggtgacggtcggccgaaaccgccatgcaaggtcgagttcattgaaccgccgctgttcgaggaatgaactgaaataccagataaaaaaacgaaaccctccacacgaggcggagggcatgtcagcaagcaaccagtttagccgatgtggagggatttcgtgaactgccagaactgcaacaccataatcgaaaacgggtacgcgctgtgcacggcgtgcgagctgcgcttcgccggcacgctcctgcgactggcgcgcgacgtcacgccgttgcacgactcgttggatgcgaccctgcatccgggcgggcattcgcccgtgcgaatccagacggccactcccccgactcctatcaggcttgacgtgctcgacctgatcgacatgctcgacgccacggcccgtgaactatggcgccgcctcgacggcatcgacgcactcgactggcgcaaagacaaacgcaacgaggatctgaaggccacgctcatcgcatgcgcaggccaccccaggctcgcctcgttcgcggacgcgggcttctacatgcacgtcgttgacggcatcgcacgcaaagtcgatgctgcgctggacccgccggagcaacgccgcgagataggaacctgcgaactatgcgaaaccatgctcaccgcaggagccaacgaccagtgggtcacatgccccgtatgcgggcgcgaacagcgagcgcagaccgtgaaactgcgcaggctcaagacattgtgctgggatgactccaagcgaggttccgccgccgacatcgccaaggctttcgccgaggctggcatcaaggtcagtcgcaagaccatcaccatgtgggggcaacgcgacaagctcttccgtcacgcggacggatacgcctactgcgacgtgtaccggctgctcatcggacccgctgatttgacagttatggcttagtgttgccataatatgcagtggcagaagtgtcgaaaaacccagctcaagtggctgggttttcgcgtatctatgctttgttcttgcgcggccttccccgccgacaccacgtcccggacgttgagcgttccactcatcgatggtctcgggcacaatgactgcgaggcgtacatgagctggcgagtctgctcgacccccggatgcccgaacctcatcgagacgccggcccgcaaatgcgacgcctgcgctcgggcccagcgggaccgcgcccgtacccgaggccataacccctacggcaccaaggggcaccaatcattccgcaggcaagtgctcgcacgagacccatactgcacatgccccggcgactccggacgcggaggctgcggcaaacaccacggactctgcggcaatccaagcacaatcgcagaccattacccatacgaaagaaccgaactcatcgacatgcgactcaaccccaacgacccgaagttcggacgaggcctatgcaaacaatgccacgatgtaaaaaccggcaaaacaagaccagcaggcttcaacaccagacaataaacaggaacactgtgcatcacgacaaaaacagccggcaacacccccagggggggtggggtgacgaccaccccgcttggaccgccggtgagctgtctgtcgggtgcgcagggttcaaacatcgctggcgggccgccgcgagggcggtctcgtcgatctgtcgctagggcgcaaggccatgacgagaggtgaacatcatgccaagtggaggcaaacgagtacgctccgggccggccaaggacccgaacagcgagaagagccgcagactcggatacacattgcagagcctgccgaacaccgagtgccggatgaagccgccggaatggcccttggagcccgccgatgacgagcgcgtccgcaaacttgaggcggagaagtggaagtggctgtggaagctgcctcaggcacgcgcctggcatctgccccagttcaagtggatgattcacgaactggcgttgtacgcgcggctttccaccgcatgcgagatcgcgccggcacccacggcgttgaccgtgctgctgcgcatctccgaccgcgtcggcatgagcgccgccggattgcaggcattaggctggaaaatcgaagcggaggccgagcggaagccagtcgattcggagttcacgcgccgcagggccaaggagctgaaccaggaatcagccgccgaacgctctcccatggacgagacgaagcatgtgtaccagcgtcggatgagcggcaatggctgacgaggattcatggctcatcgacttccccacgttggggcatctggtgtgcgcatggatcgaacgtcactgccggcagcctgacggcccgttgcgaggccgtccagtggtgctgtccgactggcagtactggctggcggcgaaccgttggcgcatccgcgaggacgccccatatgtgccgcccgaggaagtcaccgtcgacaacccgatggtactcaaccaggcattcgaataccgcatgacgctgaccgtcggaccgcagaaatggggcaaggggccatgcacggcgttcttcaccgccgccgagggctgcgggcccaccatcttcgatggctgggcgcgagaaggcgacatgtaccgttgcgctgacaacggttgtccgtgcggctgggagtggccgtacaatccgggcgagccgaaaggccgtcgacatccgtcgccgctcatccagctgaccgccaactccgaggaacaggtacgcaacatctaccgtcctctcgtggcgacgatcctgctgggcccgctcaaggagctcatgcgcgtgagggacaccttcatccgcatattgcagccggggcgcgaaggcgaggccgacgccttggacttggatcgcatcgacgtggtcaccgcctcggcgaaatcccgtctgggcaatccgatcacggacgccgaacaggacgaggccggcctgtacacgaaatcgaacggcatgatagcggtcgccaccacgcagcgccgaggagccgccggcatgggcggccgcacacatgcgtggacgaacgcatgggatccgggcgaggacagttacgcgcagcaggtgttcgagaacgc

SEQ ID NO: 3051 - DNA, 30390 bp, Unknown
  R19_24m  MAG No. k141_23608
atcagcatgatgatggcccacatcaaggcgaacagcagcgtagtcttcaggccgttgaaatggccgtgcacccgtactttggcatccatgaggctcacactaaaatcactgcctgaatattggctggatgtgcgccgaggggtgaatcggatgggggttggcggtgcttacggtgcggttggcggggatcggaatagcctgtttacatgagattgacgatgcttgacagtgcggttgcttggcctgttttaccgctttaccgctttaccgattggtctgatcgggacgctttgcttgtttggcctgctttggctgcttggatcgtttggcccatcggcctgctcgactggcatgacactggcttttatataaataagaacgctggcgtataaccggcgttcttatttatcgatgtatcaatcgcgccgattgctgctggtgcagttgccggtgcgatgagctgatagtcaatcaggccagagcgagctcacgcatctggtcgggctcgatgaccttcttgtgctcgcggccctccttggcgccttcggcgcgctcgaaggcgtcgaccttcttccagccagcgaagtcgatcggcttgacgccgcggctttccagcagtcggtcgatggattcggggtcgcggtcggctgccacgcggccaccttcagcggccttggccagatcctcaagcatgttggtcacgatggcgagcgcatcggacttggtggagccgatcaggcccaccgggccgcgcttggcccaaccggtggcgtacaggcggtcgcgcacttcgccgccgtcggcctcggtggtgatgcggccgtcgccgttggcgttggccaggtgggcgccgtgctcgtcgtaggcaatgccgggggcttcggcgggcttgtaaccgatggcgtggtagacggcctcaaccgggtagtcggtgaactcgccggtgcggtgcatcttgccgtcggcaccggtttcggtgcgctccacgcggatggccttgaccttgccgtcctcgccgagaatctcggtgggggcggagttgaagtgcacgtagtactttcggtcggccgggttgccttcgaagtcgacgtcgccgtcgtcttccatgtcttcggccatctcgcggatggcgaacagctcctcgaccatctggcgggtgagcttgtccttgccggccacctcgatggtctcgtcgtccagatcgaagtcgtcctcgttgatgatgagctgcacgccgggcagcttctccatctcgcgcagttcctgcacgctgaacttggcctgggccacgccacggcggatgaacaggtggagcaccttggccttgttctggccgatgccctcgtacacgttgtccggaatatcggtcttggccttgaggtcgtcggcgttgcgcatgagttcgcgggccacgtccatggccacgttgccgccgccgatcacggcgacgttctcggccgaaagcggccattcgcgggcaccggtggggtaaccgtcataccattcgacgaacttggcggcaccgtacacaccttcaaggtcggcaccgggcaggttcagcggcttgtccttgaccgcgccggtggcgaacagcacggcgtcgtaacgggccatcaggtcgtcaagagtcacgtccttgccgaattccacgtcgcaatagaggtggatgttcgggttgtcgagcgtcttctcaagcgcggaggcgatgaacttgatggacgggtggtccggggccacaccgtaacgcaccaggccgaagggcacgggcagcttctcgaacaggtcgatgcgcgcttcggtgccgaggccaagttcttcgcccagcttcttgagctggcgcaggaagatatcggatgagtagacgccggccggaccagcgccgattacagcaatacgaagttcagtgttcacagattcagtcacgcgctctagcctaacgcaaagccttccgttgcaacagagggcgagtggtgggaattctgtgtattaggccatagtttgtgcgtttgggaaacctacgagcactgctaatgtcagattatgggtttccctattggtcaagttattgccgttctcattccaagaagcatgcgaggcggatcaggcccttacttcggatacgtttatgctgcaaggcggttatccacgcatttatgacacgagaatgccgctcaatctgttcttctcgaactacatcgacacttatatcgaacgtgatgtttccgaatatcttgatgtacgcaatttggctgaattccgccgattcttgactctttgcgcactcagttccggagcactcataaactacaccaacatcgccaatgaacttgatgtaagtccgcgaaccgtaaaggcatggatgtcgattctggaatcaagttacatcgcattccatctcatgccgttctacacgaacgcacgcaaacaggtggtcaaaacgccgaaactctatttttatgacactggcttgctgtgtcatctcttgggcattcggacggtcgaagcactggttgcgcatcccaagttcggcgatatatttgaaaacctcatcattgcggaaaccatgaaacagcatttgaacgccaatcaggagccacaattattcttctaccgcgatgccagcaaggtcgaggtggatttgttggatttcaccgatcctaacaaccgtatgctcatagaaatcaaatccggacaaacctatcatgaccggttcgcccgccatctcactttaattggcaatgttctcggtataccgtgtgagcaacagtacgtaaccagtcgggttgagcatagttatgtctcacaaggaatccgcgtcacctccgcccctcgattggctagaaggccgacggtaaagagccgccgcagagcagtaggaattctgtgcaatcagtgaatcccttgaggcattaaagacgtcacctccaacggctctttacgacctcgattgcattcattaggtcatttcttcgttcattaggtcggagagtgctgaagccatcccttggaacggcggggtttcaagggccgctccgaccaaggaccgacctaataaacgtcaaatcgacctaatgaataactccgatgctattgctgctttcgtgggtgggatttccgtttccgccacgtcaccaaccgtatcgccccgattatgtttcgatgcggtggactcgacatacgaccatcccggtcagtcaactgacctacaaaaacagcagaagcctcatattcttaatcagtcccgatcaattagggcagtgagggcccagaggatgctcaccacgtcgatggcctcctggaggaaggcaccgacgacgaccgggataaggttgaacgcggcggcaatcatgccgatggtggcaagcacaaggcccgcgattacggcttgaagcatcacgcgcttggtgcggcgtgcaatggcgatggcgcgcggcacggcggcgatattgtcattcataatgaccacctgagcgctttcggaagcggcggtggacgtgccatcggtcatggccacgccgatatcggcaacagcgagcaccggggcatcattcacaccgtcaccaaccatcatcgtgacggttttgccggctcctgtagcggccctgactgcggctaccttatcctccgggaacagttcggcgtgaacctcgtcaatgccgacttcgctggcaatgatattggcggaagcccgcttgtcaccggtaagcatggcgagctcggtgacgcccaactcatgcagtttggcgagcactgccttggcgttggcgcgcggcacgtcgcgcagcacgatgcgcgcgatcagccggccgtcaacggacacatacgacgccatctcatccggctgcagcaggccaaagcgagtgcgcaggtcatctttttgctgagctccccctcttagggggagctggccgcttcgcgggctgaggggggcagcctcgccgaccgccaggaatccatcctccccggcggccgcgaaagacagccggccaacgcgcaccgcgtggccgttcacctcgccggaaacgcctttgccggcgtcttcattgatgttcttgacgaccggatactcccgtccatggccgggccagctggcctccggctcggggcataggcgctgaccatcctcgaaccgctggcgcagtcgggccatcgcctccacgccagccttggcaatgcctttggacaggatgtgcaccgagtagctttccaccacgccggccatcatcagcacatggtcttcgttgagacgggttgcggcgccgggcagcatctcgacgcgcacgacctgcggctgcttgacggtgagcgtaccggttttgtcgaagaacacctgcgtgacgcggccaaggttttccaacacgtcctgcgctttgataagcacgccggctgcggcgaggcgtccggttccggcgatgtacgccaccggtgcggcgatgagcagcgggcagggcgtggccagcaccagcacctgggcgaatcgcgtcggcaccccggacatcgcccatgcgatgccggcaatcatcagcgagagcacggtaaagggcacagccaagcggtcggcggtttttaccacggccgggcgcgactcctgcgcggaggccacgagctcgaggatgcgctggtactgcgaatcggcggccacctgggtggcacgcatggtcaatgcagtcgagccgttcaccgcgccggacatcacgcgggcgccggcgaacacttcacgcggcaccggctcaccgttgatattgctcaggtcgagcgtggccgtgccggacagcagctcaccgtcaaccggcacagtttcgcccggcagcaccatgagtacatcgcccagctgcacctgctcgaccggcaccgtgtcgaagcggtgcgcggcggccgcagccgacgccaagcccacacgccggaagccatcggacgaatcgcccttatcggtagcaaacccacaccccacaccaggcaggttgacgacgtgtgcggtctgcggcgcggcttccataagcgcggtcaaactgtgctcggccttggcttgggcgtattcctcaatggcctcgccggacgtaatcatcagcgtcaccgcccaacttgcccagtattcggcgacggccacggtggagaggatcgcgaccacggccagcacatcaaccccgacctgcccgtggcgcaaatcgtcaatcatgccgcgcacagtgtcaatcacgataatcagcaccaatgcgataaccagccactggccgaagcccggattgccaagtaccggaatcgccatcgcattgccccacggacgccaatcgcccagtaaagccagcggaattgcggcgatgacgacgaccggaagcatcggcacaagcttgcagatgtcgagaattttggtgaagaatctgatgagtgcgcccatcattgctccttacgctcgtatacggagtcgattgcggtacggcaagcgtggcccgcgcaatcggcgctgcggtcacgccttgttaacccaccggcggctttgcctggggcttcgctttgctcggctcccgcgcgaccttccgatacacggcgtaaagaaatgttcagttttgtattgaattatgcgctttgttcggagcgccgcccgaactcagtgcttgacctaccctatcaacgagcgttgcgcgacatgccggatatcgaaactacgttggcggcatgggcgcagggcacaatagcgtatacgaaaggcccgcagcaggagttgctcactgctgcggacctttgcctatctgacacggcgttcaacggttaccgctcaacgccgtgtgacgcgctgaaccagctttaccacaggccgaacgggtcggagaagccgccgccatcaccggtgccgccatcgttgttaccgttaccgttaccgtaaccattccggccgttgccgttctggttgttctgcttattctggctgttaccgttggaatcggagctggacgaaccgttcaccgacgactcctcctgatcgagcgtcacgtccacatccatggtcttgccgtcgcgcacgatggtcagcgtcaccttgtctcccaaagccgcggcacgaacgtaaccaagcagcgaatagttgttgttcaccgcgttgccgttgaaggccacgatggtgtcgccctccttgaggccggccttgtcggccgggccgccggagacgaccgcgctgccggtggcgctggacttggtgatggtcgcgccgccgcgggtcacgccgtcggcttcaaccgtgtcggacttgatgaccacgccgagggcaacgtgcttgaccttgccgtccttgatgatttcgtcggccacacgcttgacgaggttggacgggatggcgaagccgatgccgatcgaaccggcggagtcggaggaggtggcggtcgaggcgatggacgagttgatgccgatcacctggccggccgcgttgaaggtcgggccgccggagttgccggggttgatggccgcgtcgatctggacggcgttggtgacgatctcgttgttgttgtcgtcggtcacggtcaccgggcggttcagggcggagacgataccggtggtggcggtgtcgtcgtagccgagcgggttgccgatggccatcacgttctcgccgacggcgagcttgtcggaatcggcgaatttcacggccttgaggtcgctcggcgggttgtcgagcttgatgaccgcaagatcggtggtggtgtcggtgccgacgagcgtggcggaatacatgttgccgttggcaagcgtcacctgaatctgctgggcaccggagatcacgtggttgttggtgatgatgtggccttcggtgtcgatgatggcgccggagcccttggcggtgccgttgctcaacgcggtctggatggagaccacggagccggagacatcgctggcgacagtctgccagtcgggggcttcgccgctcttggcggtggcggacccggagccggacttattcgagctgacgttggacagcgaattgctggtcggcaaggtgatcaggccgctggtgagggcgccgtagccgaggcccaggcagaggcccgcagccagaacggcggcgaccacggcgatgaggatgttgctcgccgtcttggacatgccctgcttggcggggccgggctgaccgggctgtcccggctgggccgggccttgaccgttcggcgtaccggtaccgggagtgccgaaaccgaacagaccgccctgctggggctgctggccattccggccattctgaccggactggctggcaaacgggttgccgttgttctgctgcggctgcgtgggcggattgaacggattgccgttgccctgcggctgcgggttattggtgtagtagggattgcggttgccctgctggccctgtggggtttgctgtgcaggctgaccgaacgggaattgctgcgtgggctgggcattgctgccggcctggccgccctgctggccctgtgcctgagtcggggtcggaccataagcgccatattccggggccggacgatacagcggagttgtggccgaggtctggcctgcggccggtgctgccggagaagccggcgaggaggagaccaccgtgctctcgcccttggcggaggcgtagtccgggatgggctcggtggcggcagtgtcggtagcggcttgcgtaggctgctgatcggcagcgagggcggccgaggaaaccggggcttgctgctcgctggaatcgctggcgttgccggcatcaaccgagtcgccacccacaaacgggttcttcggctcggcgttgccggtatcggcagtactattggggttttcgttattccgcggggtctggtcgacgccctgcgggttaaattcgtcagccattgctgctccttttcctaaattcctatcacgtctgttcggcggctattcgggcacttgcccattgccacttctcgtgtgctacctcagtagtaaaggcagtcaatctggaggttttctgaacgttgattgaaagtctatgcgtaatcatcgcagagtcttatgggcatctcggcttcgaggggctgatttcctgtttcgggaacatctacttgcacttcaaggggctgttcgcgcggtcaattccgagtatcaagggccctcatttaacgccattccgccatttttgcagccggcctacttgaccgggagccccttgaagcggaagtagacgttcgggagcggcgaaatccgcccctcgaaaccgagttcttcacaatttccggcccttttctggcccttctgcctaaagtgaacatatgacgatcagccttcttgaacatccgttgggcgcacagcccggacagcccggcgaccgcagcgccttccatttcgaaacgatcacccgcctgccatccacggccagcgggcttgggcgagacggtgcccgatacggccgcaccggcatcattcacacgccccacggcgatattcgcacgcctgccttcgtgccggtgggcacgcaagccgcgatgaaggccgtgctgcccgagcagatgaaggatctaggcgcacagtgcctgctggccaacgccttccacctgttcgagcgcccgggcgaggacgtgctggacgcggccggcggcttggcgcgtttcatgaactgggatgggcccacgttcaccgattctggcggtttccaagtgatgtcgctgggcgtcggcttcaagaagacgctggcaatggacgtgaccggcatgaagtcggacgacatcatcgccaagggcaaggagcgcatggcctgggtggatgaggacggcgtgacgttcaagtcgcctttgaatggtgacgcacatcgtttctccgctgagatttcgatgggcatccagcacaaaatcggcgcagacatcatgttcgcgttcgacgaactcaccacgctgatgaacacccgctcctaccaggaggactcggtggagcgcaccttccgctgggcccgccgatgcgtggacgagcaccagcggctgacggctgagcggctgggcaagccctatcaggcgctgtatggcgtggtgcagggcgcgaattacgaggatctacgccggcgcgcggcctcgcagatcgcctcgctggacttcgacggcgtgggaatcggcggcgcaatcgagaagcgcatcattggagacacctgcgcgtggatctgcgacgcgatgccggagaaccgcccgcgccatgtgctgggcatcgcctccgtggacgatatttttgtgtgcgtggagaacggcggcgacaccttcgactgcgtggcccccgcgcgctgcgcccgcaacggcgcgatctacacgcgcgccggccggtacaacatcaagcgcgcccagcataagttcgatttcgggccgctggaggagggatgcgactgctacacatgccagcattattcgcgcgcgtacgtcgaccacctgctgcgcgcccgcgagttcaacgggttcacactggccacgattcataacgagcatttcttcgtgaaactgctggacgacatccgcgcctcgatcgacggcggatactttgatgagttccgcgacgaagcgttggcccacttctacggcaacggcgagcgccggccagggttgtgagtttttctccttcgttgcggcttgtgccgaacttctctctgctcccctcgctgaggctgagacgttaagcaaacagcccagtgggctgtttgtagtcgaaggtgagacgatagtcgaaccagcaggttgcaggcaaggcccgtccttaattgcggacgagctgtcacgaagtgactgaggggagtgccgccaccctcaaagatcacggcgcccgcaggagacccacaagcgatatatccctgcctcccatgcgacacgccgaagattgcatgattacccagccgggtgtaagttagtcgattgtctgcgagtgtggcggaatggtagacgcgctgtcttcaggtggcagtgagtgtatgctcgtgggggttcaactccccccactcgcaccagcaactaaagggctggaatcggaaggttccagcccttttgctttgtccgggcaagcgccgtttttcagggggggctttaggacttgagacttatggcccaactttcgtggcggaaaatgtcccggtacctgcatcaatcgtttgacgttcaagccaggccagaatccgctgtcccggttcgcgatttcgggcgatctttgcaaaccgggacaatttttgttgccccggtataaatgtcaatcgatttatgcgaaaaccgggacaacgtgccaattccagaatcggccttattccgccgattccgtctgccagacgatatgagttgaggaaaccggagtgtcccggttcacgaaaacaagccgaaatcgccgaccgggacagcggattctgccccggtcgacaggtcaaacgattgacatatgaaccgggacaaatacagatcagagagaagcccatgaagcagatttaactttcctcaactttccatccgccataaactagcattacataacatcatgaaccgagacgaaaccaacgaagtatctggagtcaccgacgaccagctcggccgaacggccgagccgtacgaatccggcaactggcggggcggcgttgggagcatcattcgcagcaatccgaaatcaggaaccgacacaagtcggacccagcagacacgcataatacgagttcacagactcggcgatgtattccgcaaccgcaccaccgaataccgcaccacggaagaactgtaagcattacgaaatcaaccttgattattgcgcgggcctatactaggttacggtagcgtaggttagtggtcgggagagcgtcgccggccatagcgaggtgatcagtatgagcgtttccatcagcacgccatctggacgaaccatggcttccgccgcaacagttgcgccttccgcaaccgcgagtcaaaaatccagcgcaaacgccaaccccaccgcactggaccgtgcatcggcccgatacagggccgcgcaatcgcgctaccgccaagccaaggccgcactgaaggcgatcaagcgccagatcgtccccgtggatgcattcggcaatcgcaagccgcgactgcgcggatggcttcacctcgccaccctgccgctgtgcatcgcggcgtccatcgtactcatctgcatcgcgccggccggctcggtcaaagcggcctgcgcggtgtacggcgcctcggccatgctgctgttcggcaacagcgcgctgctgcacgtcgtgccatggcgcagcgcgaaggtgactcgcgtgctgtgcggcatcgattattcgaacatcttcctcatcatcgccggcaccaacacacccgtgctgttcgcgctcagcccggcgattcgccggccatatctcacggtaatctggacgaccgcggcgattggcacgatactgcatatcgtctggctgcggacgccgaactgggtgttcaccaccgtatacgtcgtgttgggactggccccggtaacgcttattccgcagctctggacggctcccgcagtaggcccggcgccgaccgtgctcatcgcgtgcggaggcgccgcgtacatcgccggcgctgtatgcttcgcgttgcgcagacccaaccccgtgcccggctggttcgagtttcacgaggtgtttcacttgggcacggtcatcgggtatgcctgccacgtcgtggcgatttatctgattgtctgcgcgctgtaggttcgctcgcccagcaccgaggcgggccttcatacgttacgagataggttcttgaccagccagccgtgacggccgccttcatagacctcgtcagtgagccggtagccgcgctgttcgtagaacttgtagtggtcgttctccgagtgcacggcggccatggttccgccggcttgcgcgatgcggcgttcggcgtcggccagcagccgcgagccgatgtgcctgccttgcgcctcgggcagcaccgccagtcgcgcgatgatgtatcgcccgggctggtcgggatgatcggggtccgcgtagaaccgacaggtcgctacggggtgattctggctgggctgaatggactggctgcgtgaggccaattgcgcggacgagccagggcgattgggcgcatcattatccgaatcgaacgccagcagatgcacggacgcggcatcccattcatcgaattccggccgccagtcgcgttcgcggatgaacacctgctcgcggatggcgcgggccgcgtcgggcaaccggtcgtatgcttcgattcgtatggtcatgagcgtcagtgtaatgcgtcacgataaccgacaaagcccggctcggtggacgagctcgggcccaagctcggcaggctcaggccgtacgcgcgatctgcacggcggtgccggacgcggtgaccatcagcataccgttgtcggcgccgagcacctcgtagtcgatgtccacgccgaccacggcgtgcgcgcccatcgcctccgcacgctgctgcatctcggcgatggcctcgttgcgggcacgcatcagctcttcctcatagccctggctgcggccgccgaacatgttacgcaggcccgcgccaagatccttgaacatgttcacaccggataccacttcgccgaagacgatgccctggtagttggtgatggtgtatccgtcgacggacggggtggtggtgacgagaatcatggcgaggctcctttggcttgtctgcgtagataaatcactgccgagagtcggaccgttcccgaatctcacctcggaaacggatcgcttctcttggctaccacaatagtcggcagcgtccacaccgacattttcgacccgtccgatcgcataatcaaaagcatcaggatcgatatgcaaaaccaccgaggatcgtggatcgcttgtggatcttgaagcgttgtatcctggttgttcatggagcgggaacgcaaaatcattaacgtcgtgggagctgcaatcgtcaccaacggcaccgtactatgcgcccagcgtggcccgggaaagtcgttggccggatactgggagttccccggcggcaaaattgagccttatgaaacagcgcggcaagccttgcaccgcgaaatcgaagaagagctgttatgcgaagttgaggtcgcggaagaggtatgtaccagcgaatacgcctacgactttggaaccgtgcggctcaccacattcatctgtcacctcatcgccggtacgccgcatctcaccgagcacaccgatatccgatggctgaatcctactgatatgccgacattgaactgggctccggtagatcgcgaagcagtcgcgattatcgcgaacaaacaactgacgctccaatgaacgcgccacagcgcagtcaggcagtcatcaaacgatccgaatcgcaagggaacagggcaacatgtctataaatctggtcagcacctcagactctccagccaacacgcaacatcacgattctgatccaaccccctcgatcctcgaagatgtcatctcaggtctgatcgagccgcgctcagatgctcccggcgaatataagccgaccctcatcgcaaatcgccccggtggattgaccatgcacgaggaaatcggcaattccttggctactagcgattccttcgacatttctgtcgcattcgtctcggctgaggccgtgctcagcttatttgaagacttcagaagtcaccatgaaacagcgacccgagcgggcacactgattacctcaacgaaaaatcatttcaacgatcccagggcattctgggagctgctgcatcttcagaacaccactggtgttgacgttcgcgtgtgggaaggttcccgtaatacctcagtttccgcaatggctcaaggacaaccattccatcccaagggatatatcttttctcgccgcatgaaagacggtacaccctattacgacctgtacgttggcagttccaatctcactggagccgcattgaccacgcaacgcgaatggaatctcaaagtctcatcgctggcggatggagagctggtcgggcagttccaggatgaaatcgactcacaggtggctgattccgttccgctgaccgaagagtggatcaaacagtatgaggaagatttcaagaaatacgccccaccgcgtcatgagattctgcagtcgcttgaggggcatgacattcagccaaacgccatgcaacaggaggcgttggcgaatctcaagaagattcgtgaacaaggcgagcaccgcgcaattatcgtgtcggccaccggcaccggaaagacgtacctttccgcattcgacgtacgcgaatgccagccgaagcgcatgctgtacatcgcccagcagcagatgattcttcaaactgcaatgaagtcttaccaaaaggtgctcggctgcgatgaatccgaattgggattgtattcaggcaccagcaagcaacaggaccgccgctacgtattcgccacggtacagacgatgcggcagccggaggttttggcgcaattcaaatccgatgaattcgactacgttctggttgacgaagttcatcacgctggagccgaaggatatcagcgcgtcatcaatcatttcaaagatgccgacttcatgctcggcatgaccgccacgccagagcgcaccgacggcatcaacatcttcgagctattcgggcataacatcgcgtacgaaattcgcttgcaaaaggcgttggacgagaacatgctctgtccattccactactacggtgttgcggaataccttggctccaacgacgatccgaatggaatcacccatcgtctcgatgtctccaagggccttgatgcgaaggactcgaaacagctcaagtacgagatcgagcagcttgccaccgaaaagcgagtccgctacatcattgacaagttgcaggaatatgggcagttcaacattccggtcaccggactcgtgttctgcagccgacaggaggaagcccataagctatcccagctgtttaaccaacagtggaatcaacaagctgaacgcccctatcgcaccgctgccgttaccagcacggacgatgacggcaggcccgtgtcccaaacgcagcgagacgaatacgtccgcaagctcattgaaggcgaactcgactatctcttcactgtcgatatgttcaatgagggagttgatattcccgccgtcaaccaaatcgtcatgttgcgcagcaccgaatccagcattatcttcacgcagcagctcgggcgcggactgcgcaaattcccgcacaaagaaagcgttgtggttatcgatttcattggcaattacaacaacaactatctgattccggtggcgttatacggcaacaccggcgaccgcgacagagctcgcaagaacctgcagagaaagtcaatcggcctgtcgtccatcagtttcgacccgatcgccaaggagcgcatccttaagtctttggacaccgccgactggtccgacatgaaaaagctgtccgaacagtatcgccaagtccgttacgagctgggccgcatccccatgcttacggacatctataactacgacccctcactgccgtataccatcgcatcgaagcgcagcaactatcttgatttcgtgcgttcccgtgaaaaaagcctgggcaaaggcaaacatcatgaagcgacatttgaggatcagttggagccggtgaccgacgttgaagacgcgatactcaagatggcagcggagctgctgctgcccggattgcgaccgcacgaattggtcattcttgctcagctatgccatttcgtcagcgaacggctcgacgacgacgtaccgcagcattggagtgcgggctcgccaatcggccgcagcgaattgctcgatgcgattcgtactgaattcccgcagtccgatagttcagacacgcaattcgactctgcgatcagcgtgctcgattactcatatttcaccggcccaaactgcaatcgtttcggcaatcagccattagtcgaagccgtgaacagcaccggcacagaaaacggtaccgcatatcggttgaacagcagattcgccgatatgcttgccacgaacagaacgttccgtatcttctttgcggacactctgcgcaccggtatggccaattgccgagatatattccgtgaggccgccgccaggcaacaggtctttgatcacatgttcttgtacgaacgcaaatattccatggcagacgtcatgcgactgtgcggatggaagaaggagaatactccgcaaaacgtgggtggttacctcctcgacaaggaaaccaataccatgcccatcttcgtgaaatacgcggcaagtcaatacgaagatgaattcctgagcacacaggaaatgaaatacttcagcaagaatggacgaactccgcagtctcccgaattccaatgggcgcttaacggcattggcccgaattggggccagacgcatttcgtcccgttattcgttatgcgcaaggcggaagaggccgagggtaagtactactacgttggccacgttgctgcgtttgacaaccctcagctcaccaccaaacctgacgcaagcggacaaggcagcgtgaaggtcacgctgtcgatcctgcggttggcccggccaatcgatccggagctctatcggcatttggtcagctgatgcctctcaactccgcaagcgtacggcggcggccattacgccgtcgccataggtggggtgggtcatgaaggcttggctggcggaggtgtcaccgcacatcaacgattcccacatggttaagcggctcatggagatggcttcaacgccgaggatggcgtcggcgatgtgcgcggcgtagagatcgcggtgcttggcgatcaggaagcgcatgagatcgaggcgcttggtcatgctggtcacgtttgaggaggccggggccgtgcggtactcgatcagcggctcgggggcgatgccgatatgggccgcgtcttttgcgggattctctgtatcccaggcactcccaaaacctccgacatgctcagtaccgccagtaaccccagcaccgcagatatcgttttccaccgtcaatccgcactccaacaacgacaggaagaagtcccagtcctcgaagccgccgcgcatcgactcgtcgtagccgccgcagcactcccacgcgacacggcgaatcatgcacgtggccgggcagcaattatgcgacacgaacgcggcggcattgccaccagtcggctggaccactgattccaggacaccgaaagtctgcagccagccgaatgcggcgaccatcgttttgtcggcggacaacatcgacaacgtgcgctcaatgaaggccggccgcaaacggtcatcgccatccaacaccactacgaacggcgtttcggcggcggcgatgccacggttgcgcgcggcggaaggaccggcgtttgcctggccgatgaggtcgatggccacaccattcgcatccatcgccccgtgccggcaatcgtcgagagtggcgttcagcatctcgacggatgcgtggtcatcggacccatcgttcacgatgatgatccgttccggacgaaccgtctggggccaatgacgactcgactgcctcgtgaatcaacgggccctgattgtagctggtaattaccactgtcactgctgccatggcggcaagtctatcgggtccggacgtgggccatccaccggcgctgcgcgctgcctcccgccagtggggaggtggcgcgctatccccggctaacgctgatgcatgtgtgcgggcacgggtttggtgcggactttggtggtgaagtagtcggactcaatcttccacaccgtgacgctgcggacctgcgcatcagtgaattccacattcggcatatgcgcctgctgcgccatcagcgtctgcaagccgtggcggcattcatccagatcctcgaccagtgacgccgtgccattgccgacgatcgacttgaacgcctcaccccaattgcacgtggtgcggcccgccaccacctcgcagtcggtctgcatggtgaaagccacgggcagtcggccaccggcggcggcgcgaatcgcgtcgagcttgcggccgcgcggcgcggagtggaaccagagcgtcagcttgccagtcgcctcgtcgtaatcaaagccgaaattcagcggcacgatagtcaggccctcggcatccgcataggccacttcaacgatgtcgcaggcggcgatgatcgcggcgatccgctcgggatcggtcacctcgcggtccgcacggcgcatcatgcgatgctcgccggcaaccgtgtgctcatcctcacgcttggcaggtttgcgagcgcccgcgatattctccatgctcatgcctgatcatccccatccacaaccgcaatccagtcgccgtagccttcctcggccatgcgcgagcgcggcacgaagcgcagggcggcggaattcatgcagtagcgcaggccgccgcggtcggccgggccgtcggtgaacacgtggcccaagtgaatctgtgtgtccgacgtgcgcacttcgatgcggtcgcggcccggaatgcggtggtcctcatgctcggtcagcaagtcaccggcaatcgggcgggagaacgcgggccagccgcagccggaatcgaacttgtcttgcgacgagaacagcggttcgccactgacgatgtccacgtagatgccgggctcaaactcctcgtcatactcgttgacgaacgggcgctcggtagcggcgttctgcgtgaccgcgaactgctcaagcgtcagatcccagatgcgttccacgtacttttgacggcgttttacgttcgcgattgcggcgatcggtacatggcagtagccgccggggttgttcaccagatagtcctgatggtgtgcctcggccgggtagaagttgcgcagcggttcgaccagtacggccgggcgctgcggctggcggtcgaccagctgctccagagccgccacatacacggcgcgctgcgtctcgtccgtgtagaacatgccggtgcggtactgccggccgcggtcctcgccctgctggtccacggagaacgggtcgatgacctccaggaacagcaatgtcagcgtccgcaggctgacctgtgccggatcaaactcgactttcacggtttcggccgcatcggtgccgcccgcgcatacctgctcgtaggtcggcgattcgacggtggattgcgcgtagccgaccgtggtgtccgtgacgccgtcgacgttctggaagtagcgctccagcccccagaagcagccgccggcgaagtatgcggtttgcgtatttccgtcattgtgttcgttacgttcgctcatacgccccacgttactacgtcgaggcggctcgcgatgcagtcaacgacacctctgcaccggcaaacccgctttcgaggggctgatttgacccccgccggaggtctactcccgtttcaaggggctggtcggccgctagaccgcatgtaaaaacccatccgcgccaacgccattccgccgattttggagcgtgaatacttcggcatcagcccctcgaaacgggagtagacctccgggagagaccaaatcagcccctcgaaacggagatagcgcttgccgcgccctccttgtcaggctttctccgttcaaagaggtacattcgggcttctgcagaatgctatcttcgttcaaagaggcaccgaatacgggaaaccccgagtacaaacgttgtcattgcaacgctcatactcgagatttcagagttcaggcacctctttgaaggcagttagttgtccgcaaggggccaaatgtacctctctgaaagcagataccccgtctcaggctcgaatcggctaacctgcgtacccgtgtgcacaccttcacgaccgcagcgtgctgagcatgccggccacttcagcggccgtcacgctgggcacataggcgcgcaccacggcgagtccgatctgcggcaacgccgccgggtccgggtagcacacgtagaccggcgcttcggtgggctggaacttgcgcttgaagttgaacagcgagtggaagccgtaggcgggttccatccagtcggccacgatctgcagcgcgtgttggagcacctgcgtgccttcgctggccggtgccccgtcctccccggcgttgtcccgatcgggattcatgccggccaggggcgccgcggacaggctcatgaactccacggcgtgcgtgggatcggcttcgccctcgtcacgcagccgctcggccatgcgcgcgatcaggaactccatgatgccgttggggctgtcggtgcgatggcgcatgaaatccaacgtccagccgacgatgcgcccgtcgcgccaggtgggcaaccagctggtgacgcccagcacgcgcccgtccgcgtcgatggcgtaaagcagccgcacgcgcgggtcgcgcagttcctcgacgccgccgagcgtgaacttcatttccggcagcgccttgagctgcgcccactcctcggagatgtcctcgatctgttcgcgcacatcgagcgacgcttccaggaatgtggactgcacgtcggtcacgccgtcgcgcttggccttgttgatggcggtgcgcacgtcctgccatttcttgccggtcgtcttccagccgcgcgggtcgaccaccatttcgctgccgacctcgatggagttccagccggcttccagcaacgcgtcgcgctgttcccgatgcacgccgtagaacaccggcgacagcgaacgttccgcacagtgctgggagaaaccgttcagatcgtccatccattccgccggatcgccgaacggtccggtgcaggtcagggcgatgccgttgagcacgcgatacgccacggccgatctgcccgtgggggacagccagtagctgttgccttcccacgtggtcatgaagctcatcgattcgccgccggtttcgaccagacgttcggcgcgcgcccgggctcgctcgttcgattcgctcacgtcgcccatccagtggatcaccacggccagcaccacgatccagaacaccaggccgacgccttggtacacgatcgaggccatcggagtgcgcggcacgaacgacagcttcatatggctcaggaagccgatgggcaggaagcgtcccggcagctcggccagcagcgacgaggccgtagcgcgtggcgagaaggtggcgggttgggcgatgccgtatatcaggtatatggcggcgcacgccagccaggccagcacgatggcgccgatgccgccgaccagcctgcaccagccgatgcggatcgggaagtgtttcatcgccgccagcagggcgatggcgaacagcagcgggggcaggacgttcgccacgcaggccacgatcgcgccgtgctgcagcagggaggccatgccgtccggcgcgaagctcagcggcacgaccagatagtaggcgacggcgatggccaccgtgaacaggttgatggccacggtgcagatggccgcgaaccgacgtccgcgatacaggccccacgccagcaccagggtcacggcggtgggcagcaacgagcgcagcaccgcgccgggcatcgaggcccgcaacagatcgaactgcaggaagcagccgccgtgcgtgtcaccggccaggcatttggccagcatgccgttgtcgacggaaaccgggctcatgagcaggccgatcgtgctgagcgggcccgcatggttatgggaggtgatggcgatgaccggccccagggccagtaccacggcgatggccgcgaatatgcgccgcgcctcgaaggaggtgctgcgcagccagtgccattcggcttcgacgtgcgcgggcggaccggccatcacacggccggcggcatggccgatcagcgcggcggcgagtatgcagtagccgctggggttgccgctgtagagcaacgtgaccaggatcgccacatagccgacgagtcggatgcgcctgcgccataggtggctgcagaacgcgctggccgccatgagcgcgccgaccggcaacaccagcgggctcaatgcgaaccgcatgcgggagacgaacagggagtcctggaacatccatccggccgccgcgcacagggtcaggcccgccagcacgccgccggccgcgcaggcgagcgcggtgacgacggtgcgcacacggccgagccatggttcggctatcgacagcatgacgagccacaggacggcgtcgaccatgagttggatgacgccgcgcgccaggaacagcgagcagatgagtttgccggcgttgaatgcggccatgctggtgctgagccgcagcggaaacgcgaatccggccatcgcggccaccagccacgccaccagattcagcgccaccagcgccgccgtggcggtgacggccagccggtggtcgtccgcccactgccgcacgtcaccggccagttcacgccagctttccgccgcatggctggaccttgccgtatgcggtttggtggcgcgggaggtcgtggcgggcttcgtccgcgagggttccgcgtcccgcaagggccgccgcgtctgcggcatggccgccggccgcgcgttcccatgctgttgttcttcgctcattgcaacacctccacttgtgggtattcctccaacgatttcgtcatttcgcccagcccggttcgcgcgccgaaccagtcgagaccggggttccagaccgcctgcaccgcatgccagtcatggtcggcgccgggcacgaccagttcggtggtctgcatgccggccgcgcgcgcggccgcggcgatggtgcgcatgttggcgaccgacttccgatcccctttgccggcgccggcgaacagcgcctggccggccgtgccggtggcggcgatggcgttgaccggcacctgcccgtcgtaggccttgcggtcgccggcgaaatatcgccgaaccatcgtctcgacgctgccgtcggtcggctcgagctcaccatccaccggcagcatcgcaccgtagatgtcggggtgacgcggcaccagctgcgtggtgcaggtgccgccttgcgagaatccgcccatcgcccacatacgggccgacttggctaccggcagcgtcgccctggcccagttcaccacgtccttggtgaggtaggtttcggcgttgcctcgggtggtgtcggcgcacaggctgttgtgcatggccgaaccgttttggtcgggtgcgagcacgatcggcgccagcccgtcatgttcggcggcgtaagcgttcatcgtggcggcgatgttgccggcgtcgatgaggcgaccgggactgcccggctgaccggcgagcagctccatcaccggcagggccggcgggcggtcggacagcgcggcgggcggcaggtagaccatcgccttgcgcgccttgaacttggattcggtgttcgggatgctgacgacgaacaccctgcccgagtcgggcatggatggcagagcgtccttgcgcgccttgtcgcgccactcgccgacgctcatcgaggccttgcgcacggtgaccgaaccgagcggggggtatggcgtatagccgacgagactgccgatggtctggtattcgccgtagatcgagtccacgccgagcgcggtggacgccagcaccagcggcaccagcacgacggccagcgcgcgacgggccccccgtaacgtcacggcggcggccagcacgaagccgaggcccgcgaagcctcccgcgacggtgaggatcaccggccaacccaacgatacgccgaacaccatgaacacgtcggacatcagccatgtggccagtagtccgcccgcgccggcgagcacggcggcggccagcgcggcggccagcggatgcaagtgacgacgttgcggcgtacgcaggccatgggaaataaacgtctcttccgtcgaagctgcggatgacgccgtagcagccgcgttcgtaggctggttggccggctggttatctgggtcgacgggcgattgggccgacgattcgccgtccggcgccaggccgtctgctgccgggccgcgcttcttgctcaatgccagcccaacaatcagtatgattgccgcgatcgcggtcagtccgaacacggtccacggcacgattccgcggaccagcgacaattccatgaacgtcttccaaacggagttcttcatccttcgtccccgcgctccaggctcctcgtcttgtaagctcacgcaatactagcgcgcgattcatagagcgtcacccaatttcacaaaaattgtcgcgagttctcatggtttccccagactccgttcagctcctgttcacatccggcctggacgtccgcagctcaaggccagtgtcggcgctggattagcggtgcgcaggcttgtcccagctttagccggaagcagggaatatgttggtggatatgactcacgcaaacgaacaacgtccagcagcgaccggcaatgtcgccgataacgtgtctgacgcccctactgaccccgcgacgagcgcggcggcaaggcccacgaccggcacggctgatggcacaacagccacaaacgccgcggccagttcaacagcaaaacccgcagccagcacctcttggaccagggaaaccaacccacgtcgagcactgttgacgattatcgtcacggtggtggttgtggtggccatcgtactggggctcggattcttcgtgaactggggattggcggccctttcggtgatcattatgattccgggggcgatttcgctggccgttctcgccaagcaccctgaatccaccggcgggcgcagcatgttcggcatctccgatccgaatacgctgcttgacccgattcgccgcccgtccgagcgccgcggcgagtaagttgctgctgcccatcgggcggtaatttacccatggggcggtaaaaggcccatggggcggtttgaagaaattgtgaaacggcagaataaagccattttgggataccgccccatgagggttttaccgccccatgggattattaccgccccatgagcaaagccaccccgctatttgcgcgcactgaccaagtaattgagcaccgatccggcggccaccagcagcgcgccacaccaaaacggcagcgacagcgccaaacccagcagcaccgcaccggccccggtggacagcaccggcgtggcataggacgcaatagccagccgctccatagacccatgcagaatgccatagccccagcaggcataaccgccgccaatcgccgccgcggcaatcaacacaaacagccatgcgaccagactcggcggctcggccggccacccctgcccggacgcgaagtggataatccacaacgccacggccacgcaggggaagaacaatgaagtgccgtccaccccatgactcatggctggcgtgaacaccgcgtacaccgaccaagcgagcgcgcccgcgaacgccagcgcatagggcaaagggttggcggcgatatgctgcacggccgcatgccagtcgagcccggaattaccgccgaccgccagcaccacgccggcagtggccacaatcgcgcccggcagcaccttgacgaccgcgtgcttgcgatgggatacgcccgccgacagcagcaccatcatcgtgggccacagatagttgaccaggctcacttccaccgaggatgcgtcggtagaggccagacccagcgagagggatatcgacgattcgtaaaatacgaacaacaggccgccgataatcaagtatttcttggggaactcgcgaatcggggccggacgccggaacatcagcagcaggatgccgccgaccgtgtagatcagggccgaaccaagcgtggcaccgaagttttcggagacgatgcgcacggtgccggccatgaagctccacagcaggatcgccatcaggccgatggtcgtggcgcgcgcggatacgacgtggccgccggaacggctcgccgccggggccggtgtgccgcttgcgttctgtgcgccgttcgccatatgcccgcctctcttgcctcgtttcgaaggcattctactcatcggatgtgtacagctgcagaacggcacacgaccggcgcgcgaacagggtggggttcggtgattgaaacagcaaaatgccgggtagggtaaatccctactcggcatttgcattggctatgtttcccgccgtctgtcaggttagtcggcgttgaaagcgtagggcaggcggcgtgggaagcatggtttggttacgatttatctctcccccacccgcttcgcgggagctccctcgtcagagggggcaaagctactcgaagcgggacttcgggacgaatcaagtatcgtcagccctcaatcgcgatttggtgcttggactcgacttgcggctgggcctgcatcttcggaacctggatgcacagcgtgccgttccggtagctggcgtggatgtcggactccttcacgtcctcgccaacgtagaaactacgcgagcaggagcccatgtagcgttcgcgacgcagccacttgcccgaatcggacgcgcaagcgcacttgctgtcggaagcctcgccctcagcggccggagccttgtcctcatgctcgctgcaacgcgaggcggacacggtcagatagccgttgttgagctcaaggttgatatcttccttcttaaagccaggcatatcgatgtcgacgtcgtaacccttgtcggtctcgcgcacatcggtggtcatcatgttggcaggcattgcggcactcatcgtgttgtccgtgttgcgccaaccctcaaagaacggatcatcgaacagatccgagaacatcgtgtcattcatcaaagccggaaacattgccataatcggtactccttgattaggagagaatcggcttggatgccggccgccaacccgtatcgcggggctagcagcggttatcgtggccggttccggaaccctcccgggctctcaacctttaaccttcacttcacccaattcccgagcgcggcaatcattccgggattatgcccacagagaaattgcggcggggaatggttgccggtaaagccggccgagccgagcgccgtgaccaccctcagccagtcttacggctgccagctcccgccagcgggagcatatatacgcacaccagtaggcgtactcatatacctctgccaacgggagcatgctggcgcgcgaacggctcacatctgccgggcgttttcgagcaaggcgtttttgaggtcggactcgatttggcgcatcttgacctgggcggcctcgcggttggccttgccttccttctggatctgcacggtctccttcagggtggcgatgagttcggcgttgatcttctccagcgtgtcgatttccaccacggaacgctggttggccttttccgcgtccaccgcacccttgtgcagggcggccgcgttacgcgccagcagcttgttggtcacatcgtcggccttgttctgcaggtcgagggccttgcgctggttggacaggcccagcgcgatcaccatctggctcttccacaccggaatcgtggtggagatggtggtgtcgatcttgtccacgatggtctggtccgcgttctggatgattttgatctgcggcgcggtctgcaaggtgaccacgctgatgcggtcgaggtcgtcgagtcgcttggcaaaacggtcgagcttggacttgaagtccttcagcacttgcgcctgcatggcgtcgccactggcggcggcctcggcctccagcgctggcagctggttggcgttgaagtcggcgagcgccttcttgccggccagtacggtcattttcagctcacggtattgctgggcgttctgcgtgtacatcgtgtcgtacatggagatgtcggccacgagtttggcttgcgcggattcgagacgcacgatgatttcgtcgatttgcgcgtcgactttctgatagcggcggcgcagcttatccacgctgacggccacctggccgatgatcggaatggtgcggaagccgccgaggtcagcctcgtcaatggtgaccagcatggtgttcagtagttcgcccgcctcgccggtgtctttggagcgggtgtcggagaggatttcgtcggcgaaggtggaggtggcgcgctgggcgtccttgccgtagctggattcgatgccgtcgcgagtgaagtcgatctggccggccatctggttgaccgtggcctggtcggcttcgggcaatttggcgatctgctggtccggggtcagggccgcggcggcttgggcttcggcggcggtggggacgagggtggtgttgggggcggcttggttggtgttgagtaacgggttggtgatgggggttgcggagcttttggtgaggtctgcgagggtgatgttttggggcattctggttccttttttgatagttatgtttgggtctctccccccacccggctttgccgggagcccgaacgcaattaaggacggcttacagccgatttcttatttgctcgctctcgctcgccttcgtctacaaacagcccactgggctgtttgctatacgactcagctcgtcagagggggttaataaaaacaccgattgggggctggcaaaagagttattgcgtggattggagggtggcgatgagttgttgcatggcgtcgttgttgggcagttcggatacggcggggatctggtcgagcgtgccgggcacgccgaatcggctgatcgaatcggtgccggcgaagttggccgcgcggaagccgtggcgctcccacgccagcttctgcaccgccggtgttttcaacaggttcagcagtgtgccgcctttctcgtccaaggccatcagcgtgtgggtgctccacacggtcggcgtcgggtagacgatgaccacgtcgtccttgatctgcttgaacgcatccggttggttcacggccaaatcaagcagctgcgattcgtagcccaccatcatcggcttggagcccacgcccaaggtcaggaactggttgaacgaatcctcggaagaggtctccatccaaccggatttggcgaagatggaggcgatggtcttgccgtcgcgcgccaccgaatcgaccgtggccggctgcccgccattgagcaccgtggcgagcagcgccgcgtattcgttgcctgagttcgacttcaccggatcggtcgagtcgatgcggaactgcccgtagcctgccgtgtatccgacgtcggcccaggttgtgttggcgaccatcgcgtccacggctttggccatatccatgtggtacgcgcccgaatcgtccttggtcataagtccgccgttcacgagcccgtccgccacggccttgtgcgtgtacagcacaatcggtgagttgaagacgatgtcgctttgggtggccttgacgcctttcgcattgccgtattcgacggccgcgcgcgaggaggggaacaggtaatccatgcctttccggtccgcatccatcatggccagcgatccggccttgcgatagtcgatggcgatgccttgcttggcggcaagcgccttgaacttggcgtcatcgaacaggccgattttctcgccgcccaggtagccggtgatgctcacctgttcggtcggttcggccggcgctggttgcgattgccgccacaccagcgtgccgcagaccacgcccactaccgcaagcagggcgatcagtccgatgatttttgatttggagagtttcattgtgcgtccgttttctggtccgactggtgagccgggccctgactgggtgcatgccgtccttcatcggcagccgaggaaggcacaggcgaaggtgcgacgtcgtcgtatccatccatgcgggccaaccgttggatggcgtcggagtcggccgtaatgcccaacgtcttggcgcttaccgcccggctgagttcgccggcggcggtctgttcgagcacttgcagcgcctcgatggtttcgattcgtaccgtggctatctgatcgcgtgcgccggaactttccacgtccacgtaggagcgcaacagtttctcggtctgctcgccgtacacggtgatgtagtggcgcaacgtcgggtaggcggaggtgtctcgggtcacgtattgcactcaatctttggtagcggcgatgaagtcgttggcttcggctttgacggctgggtcacgtacttgcttggtgagcatggcgatcgagttgagttgagcgttcgccgcgtcgatcgtatcggcggtcttctgaccgttgggcaaggcggaaaccagcattttgccgatgcgtcgctccggctcggtgagcgtggaggcggcgatatacccaagtgcggccagtaccacggccacgatcaggccgggcactccgccgccgaccagtccgaaaccgagcccggcgagcagcagtccgacaacgaatccacagattacctggagcatcagttgaagcccttgacttggcggaagacggcggcgaggtcgccggagcggccgtcgaataccttggcgttgctcagggtggcgagagacttcagctggctgggatcggcatcgccgaacagggttaagggtcaaaaagtgtgtccggaatcgcggattttcacggattgacctgtaggtttccggaaagtatatgctccggaagcatatatctagcccccgacgggaaatcctcggtgtggcagccgtgatgtgctatgcg

SEQ ID NO: 3052 - DNA, 21568 bp, Unknown
  R19_24m  MAG No. k141_24074
atcgaccgcgatctgaacgcggccatcaacatccaagtcgccgggagtgccccggagacgttatacgcgcgcggaggaagcggaagacggaccgacgcatcgcgtcgggcaacgcggcatcctgtgaaacgcgaaccaagcgacggcgtacgccgtgtgagtcttggagctggcctcggcaacgaggccatgcagatgacttcgctctagcgacaagctaaaacaaagtcatctacaacggagccaagaaaatgaggcgtatggcctatattggtgtctatgagaagcccacgcgaggattttgaggcggcaggcaagcgactgccttgggatgctgctgctcgcaatgcagcgctgtccgccaccgcgccagtctctgacgtcaaggcatccgccaatggtgccgacaatgccagcaatgccagcaatgctgaacattccgatgacatgcccaccgtgccgattcccgcacgcaaggctgccacgacgttcgacaccccctccaagcgtgagcgcatcgaggtcaagccgccgatcacccgattcatacgtcgtgccatcacccgcgtgttcggcgtatggtcacacatctccactcaggtggtgcgccaatggggctggtatccgcgagtggaaccctatgtgggttatggcaccggcgattactcgcgcctgatctgccgcacggtatacgcccccaagcatgcgcaatccggcgaactgatccgcggcatccgcggcatgcttgccgtatccgcgccgcgcacccacgtgcaggccagcattgatgacacgccgctcaacaccgtgcagatcggcgtctccgaggtctatgacaaggtggaccgcacgcgcgatctcggcagcgaatacgccatctccgattccgccggatacctcgacctcgtggccgagcatcgtctggtgcccggtatccatcgcgtctcctacagcgtggccaaccgcaaacccgtgagcgccaacctgtacaccatccccgccagtgccaaagtcggcatcatctccgatgtggacgacaccatcatgatcacacaggccccggtgccatggaaggccgcgtacaacctgctgttcctcgaccccaagaagaaagcctccgtgccgggcatgagcgtgctgttcacccgcatcgccgacttgttccccggcgcaccgttcttctatctttcgacatcgccctggaatgtggagagttcgattcgcaacttcatcactgaccatggttttcccgaaggcccgctgctgctgcgcgacctcgacccgaggcccaagaccttcgtgcccaccggcccccagcacaaacttgagtttgccgaacaacttatggccgacttcccggacatgaagttcattctggtgggcgatgacgggcagaaggacccgaccacgtacgccaccatcgcccgcagatatcccggacgtgtactggctatcgtcattcgtgagttgagcccgcgcgaatcaaccggattggcgtcggtgacgggactcacctcgacccagccgactccggtaaccgatgtaccagtattcaccggcaccaccggctcaaacattctgaagaccatgctgccgtatctgaagacggtgttgcgataagcgcggcgtgatgaacgccgaatgcgtcccggtgtggtgcctcgcctataatcgcgtgttatgactgacgagagcacaaacgccgcggccgcgatgccgccttacgccaagcgcgagccgaagcgccgcgaattccacggtgacgttttcgacgacgattacgagtggatgcgagacaaagactccgatgatgtgcgcagctacgtagctgccgaaaaccagtactgcgagcgtcgcatggcgcatctggcggatttccggcatacgttgtttgaagagctgaaatcgcatgtggaagagaccgatatgtctgttcctacgcgcatcaacgattactggtacttcacccgcacgcagcagggcaaacagtatggcgtgcaatgccgcatccccgtgcgcgatgccgatgactgggacccgccggtcgtggatccgcaaggcgcgcccggctccatgcccggtgaacaggtcgtttttgatgcgaacaaggaatccgaggggcatgacttcttccggctcggcggcttggatctgagcaaggacggccgttggatgctgtacggcgtggatgttgcgggagacgaacgatatgatttccgcattcgcgtccttgccgggctggagaccggggagccggtcagcgaactgcccgaacagttcaccggcattggcagcgcatgcttcacgccggacggccaatgggtgttctgggtggaattggacgattcctggcggccgctcgccgtgtggcggcatcgtgttggcacggcggtcgaatcggatgtgtgcgtgtaccgagaaaccgatgaacggttctgggtgggcgtcggcatcagttttgatgagcgcaatatcgtgatcggcaccggttccaaaaccaccaccgaagtgctgatgctgccggtggccacgcctgaaggcgaattccaagccttcattccacgtcagaacgatattgaatatgatgtgagctttgcctgttttgaaggcgcgggggagaacggtgcggatgtgccactcgccgtggtctaccacaacgccgccaatccgaatttcgaaatcgacgtcattgacatgcgtggccatgagccgccgtaccgactcggcgaaggcgtgtgcatcgccgccgggtcgccgtacggctgtgaacatggtgagccggataagccgattaccgaggcatacttcaacgccgccaatccggcgatattgcagggtgcccacggtctgggcatcgaaggcatcgcgttgcatcgcaactttgtgtccctgagctaccgtgccgacggccagccgcacgtggcatacatgaccaagagcgcggccgccgccgacttcctggccggacggccgtggcggtttacggaactgctgccgcctgccctggaggacgactgggacatggtcgccgccgatcgcgaaaacttcaccggcgatcatggcgaaatcttgtggaccgaagatgaggcccccacggatcacacgtcatcttccgatggtgccagcgacgaccacctgcccggtgagacccggcgcttgtacaccatcggcgtcggcggcaacccctcgtatgaggcgccgcgcatgcgctactcgttcgccagctacacccgcccgggcgagctgcacgaaatcgatcccgccaccggtgaagatgcgctgctgaagcgagccaccgtgttgggcgacttcaatccacgcgattacatggaacgccgtgtgtggattaccgcgcgcgacggcgaacgcattcctgtttccctcgtctggcaccgcgattgcccggcgcaggattcgccgatgttcattaccggatatggtgcatacgagatttcctccgatccggggttctcggtctctcgtctgagcatgttggatcgcggtgtgctgtacgccgtgccgcacattcgcggtggcggcgaaatgggacgcgcctggtatgaacaggggcgcagactgaacaagaagcattcctttgaggacttcgtggacgccacgcgcgcgctgcagaaggcgcatttggctgatgcttggcgcaccgtggccaacggcggatccgctggcggcctgctgatgggcgcgattgccaatatggcacccgaatgctacgccggtgttgaggcggatgtgccgttcgtggacgcgttgacctccattcttgacccggacttgccgttgaccgtcaccgaatgggacgaatggggagacccgttgcatgaccctgaggtgtatcagtacatgaagtcgtacacgccatacgagaatgtgccggtcaccgtgctcgagggcggcgacgacgaggctgccggtgacggcagtgctgatggggctgccgccggcgcgctcgccgccgcgcaattcccgagaatcttcatcaccacctcgatgaacgacacccgcgtgctgtacgtcgagccgctcaagtggctggcccgtctgcagtccgccggcgtggacgcggtggccaagatcgaggtcgaggccggtcacggcggtctatccgggcgttacaaacaatgggaagaggtttcctatgagaacgcttggtgcatggatgtgatggggctcgctcattaggtcatttcgtcgttcattaggtcggtgtcctcttctatgtgagactgaaatgccgccatttcagtccctgaaatgaacccacaccgacctaatgaacactaaaatgacctaatgaatgtctcgacacgatacgcatgttggttgtgtccactagctgagcgggttcgggccggcaggtggtcgcgcgagtaggctccttgaactatggcaaagacatataaaatcgccgttattcccggcgacggtattggcaaggaagtcactccgtgggctcagaaggctttggaaaaggccgctgaaggcgtagctgacttcgagtatgagaacttcgacttgggtgccgagcgttatctgcgcgatggtgcgatcctgcccgaggacgaagaggagcgcatcaaggccaacgacgcgattctgctcggcgccgtgggcgatccgcgcatcaaggccggcattctggaacgcggcctgctgctcaagctgcgcttcgacctcgaccagtacgtgaacctgcgtccctccaagctgtacaagggcgtcacctcgccgctcgccaaccccggcgacatcgacttcgtggtggtgcgtgaaggcaccgaaggtctgtactgcggcgccggcggcgcggtgcgccgcaacaccccgcaggaggtggccaccgaggtgtccatcaacaccgcatacggtgtggagcgtgtggtgcgttacgccttcaagctcgctatgaagcgcaagaagcacgtcaccctggtgcacaagaagaacgtgctcgtcaacgccggtgatatgtggcaacgcatcgtcgacaaggtcggcgaggaataccctgaggtcacccacgactaccagcacatcgatgcggccaccatcttcctggtctccgacccgagccgtttcgatgtgattctcacagacaacctcttcggcgacattctgaccgatgaggccggctccgtggtgggcggcgtgggctactccgcctccggctgcatcaacgcctccgacgagttcccgtccatgttcgagccgattcacggttccgctccggacatcgccggtcagaacaaggccaacccgaccgccgccatcctctccgccgccatgctgctcgagcatctcggctttgatgatgcggccaagaagattcacaccgccgtcgaagcggacatcgaggagctcggctccaccgtgcgctccaccgaccaggtcggcaaggacattctggcccgcatgtgatgtcccacttggctcccctccagaggggagccaagtttatactgagttgcatgcaaatgcgacatggggaatgcaaaaccgttggcggcaaactagtcgccgtgaccgtatccgtcgatgatgacggcaccgcacagtcatgccatatcagcggtgatttctttattgaatcagtttcggatgccgaatctcatgctttgttgcgtgacttggaacaggctctaattagtgatgattcattgcggtccgtattggacgctcaccctagttgccaaattatcggcacagatgaagttgccgtcaaaaccgcatatagccgagccgtaagcagcaacttgcccccgctggtgggggctcccgcgcagcgggtgggggtggtcagccccgatgcgccgaacaccccggcatccatcaatacacaaaccaagcagcccgacaaaagctctgaataccgggagcgctggaacgccctcagacctcaactcaccgtgatccacgaccatccgcgtacgccggacgagcaaatggccattgacgagacctgggcgcgtgaagtcgcagcaggaacacgacagccgaccatacggttctgggagtgggcgggcccggctgtggtcatcggccgtttccaatcggcccaggacgaggtgaatctggacattgccgagcagctcggtttcgacgtggtgcgccgttgcacgggtggtggcgcgatgtttatcgaaccgggcaacaccattacctattctctgtatgcaccgctcgatttcgttcagggcgtaagcatcgaagaatcctaccggctctgtgactggtggctggtcgaagcgctgcgcgaacttggcttggatgtgcggttcgcgggcctcaatgatatcgcctcgcagtacggcaagatcgggggagcggcgcaacggcgcttccccgtaggctcaggcggcgcggtgctgcaccatgtgaccatggcatatgacatcgatgcggccaagatgagccgtgtgctcaacaccagtcgcgagaagatgtcagacaaagcggtgaaatcagcagtcaaacgcgtggacccgatgaaaagccagacgggtctcagccgcgaacacatcgtcgaacaccttattgactggtttgcggcgtgatttcaccgatggccgtatacgattttgccggtggccgtgcgtggttttgtcatgggcgagcgcggtaaccgcgacagtgccgtttttcgcggtaacacattcgtcagcatgtcgtacggctatcggatcgcgccacacatgaagtgacgaatgatggcatgcttctgacgaaacctgtggggcgcgttacaatatgacggatggccgacgacggtcgtaggacaataaggatggtgcgatgagcttggaaacgccaaacgcttttgctgacgaggagaacatcctgctgcatacggcattgttcaagcaggtatcgccagccgaagccgaggagctgctgccgcatttgaagcgtgcgaccttcgataagggcgactatatcttctccgaaggcgataccgatcagcgcatgtatctactggagcaggggcgcgtcaagctgattcgcacttcttccgatgaccgcgtgcagctgctgtccatccacgcgccgggcgaagtgcttggcgagattccggtattcgaccctcatggtggcccgcgcactgcgtccgcggtgtccatgagccatggcacgcgcgtggtctggctggagcatgatgccctgttcgcatggcttgatgagcatccgcgtgtggccatcgacatgttgcaggtcatggccaaccgccagcgcggcaacaacgaacgcatctccgacttggtattcatggatgtgccggcgcgtctggccaagacattgctcaacttgggctcacgtttcggcgagccggtggaacagggcctcaaagtgccgcatgacctgactcaggaagagctggcccaactggtgggctccagtcgtgagaccgtgaacaaggcgttgatggacttttccaaccgcggatggatcgcacgtgacggtcgatcgatcatcatcttccagccaggcatgctgattcgacgctcgcggcgctgaccgttcggctgacttccagccaatgttacgctagtgcggttcttgtgatgatatgttcacggaagctgaccgcgagcccggttggtagggcaccccatttagaatggggcccatgcccaaaaagaagtccctcactctccaacgtgtgcttgttctcctcttggcctatatcatgcttgccgtctgcggtggcgtggcggccagcgtgttgtttgtaccgggtgtggtcggtgccaataaagccgccaaagcggtgattccgtcgctcaaggtagaaaacgtggacttcgacgtgaccggtctgccccagaagtcgacgatgtacgcgcgagacggttccaccgttatcgcgacgttctacaaccaaaaccgtatcgtcgtgccgctgaagaagatttccaaaaccatgcagcaggcagtggtggcgcgcgaggaccgtcgattctggactcacgccggcgtcgacgtgcaaggcgtgatgcgtgcgttcgtgcagacctacctcgtcaaaggctcccagcagggtggttcgtcgctgacccagcagtacgtcaagaacgtgctgctcatgcaggcgatcgaggacgacgacccgatcgcccagtaccatgccaccgaagacaccgtcgcccgtaagattcgcgagatgctgatctccgtgcagatggagaagaagtattccaaggccgagattctgcagggctatctgaacatcgcccagttcggcaacaacctgtatggcgtggaaaccgcagcccagcgctacttcagcgtgtccgccgccgatttgaacgtggtgcagtccgccaccatcgcggctatcaccaagaacccgagccagtacgatccgctggtcgaggagaaccagaaggaaagcgagaaccagcgcaacatcgtgctcaagctgatgctgcaggaggggtacatcacccagaagcagtacaccgaagccgtgaacacgccgctgaaggacacgctgaaggtgcaggccgtgaacgtcggctgccaggacaccggcgactacgcatacttctgtgatttcgtggtgcatcgcatccagaactccgaagaattcggcaagactcgtgcggagcgtaacaagctgctgcaggagggtggcctgaagatcgtcaccacgttggatgtggaagcgaattccacgatgatggagaccgcgcgtaataccattccaccggacgatcccagcggcatggaaatagccatggccgcagtcaaaccgggaaccggcgaggtgctgagctttggcctgaatcgttactatgacgccactccggcagccgcgaacgatccgaccaagtcgggccagaactatgccgtcgatctggtggacggcggcggctccggttggaccattggttcgtcttggaagccgatcaacctgattgcgtggatggaggcgggtcattcgatcaacgacaacctacagaccaccacgacgtaccccacgaccgacttcgcctgcaacaactacaagggcggtgccgattcgtggaacgtgtcgaacgccatgggcgccggcacggtgaacccggaaagcccgttcctcggtctggtgcgatcgcacaacaccacccaggcctccatgggcgccatcctcaaactgtgcaaggtggcggacaccgcgaccaaactgggataccatgacgccgccacgggtgagaccatcgacaaaacccaggtgtatacaccatccatgatgatcggctcggtgaatgtgtccccgctgaccatggcgagcatcttcgccgtatacgcctcgaatggtgtgcaatgcaacccgattgccatcagcaaggtgaccgataaggacggcaacgatctcaaggttccatccgcgaactgccatcaggcggtggataaggacatcatccaaacactcgcttataccctgaaccaaggtacggtgcggccggatggtgccggttggtcattcagattggctgacgggcgtaagtcgtttggtaagaccggtaccagtgaggatcttgcggtgtccggtggatcgttcattcctaatcagattgcggcgttcgctgtggtcggcgatgcacagaacccgtacaccaaccgtatttccaacattgccatcaacggccggtacaacagctattgggatggttcgacaatcgcagctccggccgttaccaacttcttcaatagctacatttccaagaagaaaataccgattgacaacgattacggccagcccgtctcgaagtacaccacgactggcaagtacctgggcattggcggacgaacgttcagcgtgccgcagaccactacgaatggcaacagccaatcgcagacgaccaccaatggtcaatcccagtcgcagtctcagtcgcagaacactgggcaaaacaacacccaaacccagggcaccaattcagagcggtcgaatgatggccagtgattggtgattggcgtttgacatttggtgattgcaggccggctgagtctacgtaacatagtcgactgcgatgcccaaattacgtagtttgcgggcgttacctgtttcaggtgacgcccgttttacaatacttaatgacaacgccagcgcgttcatcgaatattcgccatgaacgcgcattggaaaggggaacgatgagcgacgacgatctgacgcatgagaattttgattttcgtggattcgacgtgccggatctcaaagcggtgacgctggcttcgtcttcggacggcgaacagtccaagcagccgaagaccaagcacgaggatgcatcgaggaaccgtaggcacggtaagaagaagtcaaaatccgacgcacggtccaagaagcgggccggcgcgggcaagacgagcgaatcgttcgatgattatgaggattatgaggaaagggaagctgtgagcaaggcagataagaaagccagcaaggaccgtccgggactgtttgcgccaatgacgctgcgcgaagtgaccgtgcgtaatcgtatttggttgccgccgatgtgcacgtattcgtcgttcgcctgcgatggtaggcccacgccgttccactaccagcattacgtgtctcgtgcgttcggcggattcggcatggtgatcgtcgaatccaccgccgtggctcctgaagggcgtatcacgccgtgcgatctgggcctgtgggaagacgggcagattgatgcttggcgctggatcgtggacggtattcgcgaggcgggtgcggtgcctgccatccagctcaaccatgcggggcgtaaggcttcgaccggttgcttcgccgttggttacgacggtcagagtgtgccggaggaggcgggcggctggcccaccatggcaccgtctgaaatcgcgttcggcgggctgcgtacgccgcgcgcgctgtctgtggatgagattcatggtctggtcggtgcgttcgccgcggcggcgggccgtgcggtggccgccggcttccaggctattcagattcatgctgcgcatggctatctgatttctcagttccttgacccgctgagcaatgagcgtgatgacgaatatggtggcgatttgaccggtcgctctcgtttcctggtcgaggttgtggatgccgtgcgcggggccgtccccgagggcgtgccggttctggtgcgcatttcggccacggattgggccgctggcggttgggatttggatcagaccattgcactatccaaggtgctgaaggagcatggcgtcgatgtgatggacgtgtccactggcggcatcatgtcgggagtgtcgattccggtcaagccgaactatcaggtgccgttcgccgagcaggtcaagtccaaggccgatattccggtgaccgcggtgggtcttatcaccaagccgaagcaggcggccaagattttggcccgtggcgaagccgatgccgtggaaattggccgcgccgcattgcgcgatccgtactggccgttgcgtgcggccaacaagctgggcataccgtccacagaggtcccctacgccccgcaatacgtggccggtgcgtactgaatcctcatggggcggtaaaaccctcatggggcggtaacccaaaacggcggtattctgcggaatgtgaaatttggctaaccgccccatgggtaatagggcaatatgtgagttcactccacgtccacgccgacggcgtcggagacgtgctcgaatccgtcgcggcgcagcagctgggccagaccgcgcttcaacacggtgatctgctgcgggcctcggtacatcagcgagctgatgaacatgaccaggctggagccggaacgaatcttcgcataggcttgctcgggggtaaagacgccaccgatgccggcgatggcgaaccggtcgccatactccttatacaccttgcgaatcagctcggtgctggcgttggtgcacgggccgccggacaggccgccctcccaatcgcgcggaatctcgaggccggtgcggtccttctgcagattggcgatggacagcccctgcacattgtgctcggccagcacatcgagcagctccttgtactcgccccacggcttgttcaacggcatcttgaccagcgtgggctgcgggcggtcgatcttgtcgagcgccgtaaacagacggtcgagcgcttccggagtcgcggtgaacggttcgccgacgcgcgtgttcgggcaggagacgttgacctccaccatcgcggtgcggccggcggcgcggcgcatcgaaatgcagtaatcctcaatgccttcgtccaaatcgccgcactggtcgtcgttggtgcgggcgatcgacacagacagctgcatctggcgggcctgagtccaagccttctcggcgcgctcgatgaccttgtccgaaccgatgttggcgaggccgacgtgcaccatcatcgaatcgtattcaggcagacggtggaaccacggcttggcgttgcccgggcagggacgcgaggtggtggagcctacggtttcaaaaccgaagccggcatggtccagcaccacgggcatgtcgcagttcttgtcgaggccggcggacaggccgaacgggttggtgaaatcgacgcccatcacattcgtttccagaatggggtcggtgtagtcgagcatcagctgctcggcgagcagcagcggcgggacgttcttgacgacgtggcagaactcgatcatctgatcgtgtgcctcatcggggcggtggttgaacacgaagttcggtttgatgatgtgcttgtagccgaaggtgaacagatcggtggtggctttgttgacggcgtcgtgccagaagctttcagaaacgtaagtcataccgcctattgtctcacgcttgggctggtgcggctaggcgattcctgcctaggcgaattggggaaggggctaccgcgtgtcgaggcgcacgcaggcgtcggctcggcagaagatacatgaatcgggatgcaccaggtatcaggcgtgactcgccgctgagcaacgcgctcgggagagtcgtcggtcgtgagtcatcgcgctagtggtcgctgcgagaatatcggttcgcacaatgtgcgattttgcgcggttttgtggaaatgaacacctgaattgcccggaattttcgagagattgtccccaaaacgctcaagccggtttggtttgtgagcttttgtgtgcgataatgttcatatgatttcgtcacaacgtcagcacctcatcttgagcaggttgcgcacgcgcggggcagtgcgcattacggcgctatcgaaggaactgggtgtgtcagcgatgaccatccgccgcgatatcgccgaacttgccgacaagggactgctgaagcgcgtccatggcggcgcggtgactaccagtaccttgctcagcgaacccctgttctctgtcaagtcccagatggatctcggcctgaaggacgccatcgcccaggaagccatcaaatatgtggctcccggcgatgtgatcgccatcggcggcggcaccacggcctatgtcttcgcccagcatctgctcgaatcgcagcagtccagcggcatcaccatcctcaccaattcgattcccgtggccgaactggtccaggccctcgaatccaaggacgtggaggtgatcgtcaccggcggcgtgatcacccgatcgaactcgcttgtcggtccgatcgcggacaaggtcgtcgcctcgctgcgtgtcaacaccgtattcctcggcacccactcggtgtcgattccccgtggcttcctgatgccgaattcgctggaagccgcaaccgatatggcgatgatggacatcgccgatcgtaccatagttttgaccgatcacaccaagtggagctgcacatcgctgtcgctgtttgcgcgcttcgaccaggtggacacggtcattactgacgacgggctcgatcccgactccgccgccaaaaccaaggatttggtaaaggaactcgtgctggcccaccagagcgagatcattgaggaaagtgagtaaacccatggctgatttcgccaactacacccccggggagtatgcgaaggagcacatccgcatcacgccgacgacgcttgccgacggtcgtgacttcttctacctggacgacgaccccgagttcgtctccggtgccaagacccgcgagctcaaggacccgcgcccgctggactaccgtttcgccccgcacctggacgccgacggcaacgaagtgccgtacgccgccccgcagatgcgccgcgacccgctgaccggcgactggatcccgatggccaccgcccgtatgaaccgcccgatcaccgccggccccggcgctaccgccaagggcaacccgctggccgcccgcaagcccggtgacccgtaccaggacggcgaagtgccggacaccgactacaacgtcgtcgtgttcgagaaccgcttcccctccatggtgcgcgtgcccggcgtctccgaggacgtgacctacgttgacggcaacccgctgtgggagaagaagctcgccgccggccgctgcgaggtcatctgcttcgacccgaacgaggacggcctgccggccgatctgccggtctcccgcctgcgcaccgtggttgaggcctgggccttccgtaccgccgaaatctccaagatggaaggcatcgagcagatcttcccgttcgagaaccacggccaggaaatcggcgtctccctcgctcacccgcacggccaggtctactgctacccgttcatcgccccgaagatggagaaggaactccagcacaccgaggcctaccacgagaagaccggcggcaacctgcttaaggacatcatgaacgccgagctcgaagccggcgaacgcatcgtgatgcgcaaccacagctgggtcgcctacgtgccggccgccgcccgttggcccctcgaggtccacgtggctccggtgcgcgacgtgctcaccctcgaccagctcaacgacgaagagcgttgggacctcgcctccatgtactcgcacctcctgaagcgcggcaacgccttcttcgacaagggcgacggcaagggcatggacctgccatacatcgccgcctggcaccaggccccgatccacgacgcccgccgtgagaactaccgcctgaacctgcagttcttctccttccgtcgtgccgccaacaagatcaagtacctcgctggctccgaatccggcatggccgcctggatctccgacaccacgccggaactcatcgccaagcgcttccacgagctcggctccatcgacatcgccgactgatagaaagaaaacatcaatgactgctgttgaattcattgagccgctgacccatgaggaaggcgtctcgcaagccaccaagctgttcgtcgatacctacggcgctgcgcccgagggcgtgtgggctgctccgggccgtgtgaacctgatcggtgagcacaccgattacaacgccggcctgtgcctgccgatcgctctgccgcaccgcactttcatcgccctgaagccgcgcgaagacaccaaggttcgcgtcgtctccgacgtggctcccgacaaggtcgccgaagctgatctcgatggcctcaaggcccgtggcgtggacggctggtccgcctacccgaccggtgtggcctgggcgctgcgtcaggctggtttcgacaaggtcaagggctttgacgccgccttcgtctcctgcgtgccgctgggctccggcctgagctcctccgccgccatgacctgctccaccgctctggctctggacgacgtgtacggccttggctacggcgattccgacgccggccgtgtgaccctcatcaacgccgccatcaagtccgagaacgagatggccggtgcctccaccggcggtctcgaccagaacgcttccatgcgttgcaccgccggccatgcgctgctgcttgactgccgcccggagttgaccccgctggagaacgtctcccagcaggagttcgacctcgacaagtacaacctcgagctgcttgtggtcgatacccaggctccgcaccagctcaacgatggccagtacgctcagcgtcgcgccacctgcgaggaagccgccaagattcttggtgtggccaacctgcgtgtgaccgccgacggcatctccaaggccgatgaccagttccaggccctcaaggaaacgcttgacgccctgcctgacgagaccatgaagaagcgcgtgcgccacgtcgtcaccgaaatcgagcgcgtgcgttccttcgtgcgtgccttcgctcagggcgacatcaaggctgcgggccgtctgttcaacgcttcccacgattcgctggccgccgactacgaggtcaccgtccccgagctggacatcgccgtagacgtggcccgcaagaacggcgcctacggtgcgcgtatgaccggcggcggcttcggcggctccatcatcgctctggttgataagggccgttctcaggaagtcgctcagaagatcgccgacgaattcgaaaatcaaggcttccacgcaccgcgcgccctggccgcgtacgcagcgccgagcgcttcgcgcgaggcctaggacaacccggtgggttgtccggcggatgcggtcgaggtcgagccaataggcgaggccgaggtaatgctgggtcggccgtaggtcgtccgtaattgcaggaccgcgtgcgcagcgccgagcgctttgcgcgaggcctgagccattgcaagctccctctgacgagggagcttcgttttatcccgcaccaccaccatgcccgccggcgaatccggcaccacttattcccataacccccataacgctcctgaaaccaggcatttcgaccatccgcataaggtgatgctcggcctgtacatcggcgcattcctcggcatgctgtccgagacatccatgaacatcgccctgcccgatttgatggacgagttctccgtatcctccggtaccgcccagtggatggtcgtcggctgcatactggccattggcgtggtgatgaccgcgatcggcggcgcacagttctttaccatcggcgtcaactcgggcgttgtgctggtgttctccttcatgttcaagggcggcaaacgatacatgaatcggtaatgaacataatggcgggtgtcttccctataattgggtagtcacccgctttttgtatacgaccagggagttccatgaacaaggcaatcatcaccgtcgtcggtcaggatactgtcggcatcatcgcacgcgtctgcacatacctttccgaacatcaggtcaacgtgcttgacatttcccagaccatcatcgacggttacttcaacatgatgatgattgtcgactacgccaacgcggacaaggacttcggcgcgatggtcggcaaccttgaggacctcggcgacgacatcggtgtgcgcatccgctgccagcgtgaggaaatcttcaccaagatgcaccgtatttgaggcggcccgctcagcaggccgccgcacgcgaggaggcggaaagcccggtgggctttccgctgacggagccatccttatccctctgatgagggtgaccgccaaattagtcttcaaatatcctgtaaggaacaaaccatgctgaacatcatggaggtccacgagaccaatcagatgatcgagcaggagaagctcgacgtccgcaccatcaccatgggcatctcgttgctcgactgcgcctcggacgacgtcgacaagacctgcgacaacatctaccgcaagatcactacctatgccaaggacctcgtttccaccggcaaggccatcgaacgcgactacggcatcccgatcgtcaacaagcgcatcaccgtcaccccgatctcgctggtcggtgccagctcctgcaagacgagcgaggacttcgtcaagatcgcccacgcgcttgacaaggcggccaaggaggtcggcgtcgacctgatcggcggctactccgcactcgtctccaagtccatgaccccggccgaggagttgctcatccgctccctgccgcaagccctttccgagaccgacatcgtctgctcgtccgtgaacgtcggttccaccaagaccggcatcgacatgaacgcggtcgaactgctcggccacatcatcaaggacgttgccgagcgcaccgccgacaacgactcctacggctgcgtcaagttcgtggccttctgcaacgtgcctgacgacaacccgttcatggccggcggcttccacggcgtcaccgaaggcgacgcggtgattaatgtcggcgtttccggcccgggtgtggtctcccgtgcattggacgaggccaagggcaaggatttcgagttcctgtgcgaaaccatcaagcgcaccgcgttcaagatcacgcgcgtcggccagctggtggcacaggaggcatcccgtcgccttggcattccattcggcatcatcgacctttccctcgcgccgaccccggccgtaggcgactccgtcggcgaagtgcttgagaagatcggcctcgaacaggttggcgcaccgggcactaccgcggcgctcgccatgctcaacgaccaggtcaagaagggcggcatcatggcctccagctacgtgggtggcctgtctggtgcgttcatcccggtctccgaagacaagaacatgatcgacgcggcttcttccggttgcctgaccatcgagaagctcgaagccatgacctgcgtatgctcggtgggcctcgacatgatcgccattccgggagacaccaccgcagccaccatttccggcatcatcgccgacgaggccgcgatcggcatggtcaaccagaagaccaccgccgtgcgcgtgattccggtggaaggcaaaggcgtaggggagatggccaacttcggcggcctgatgggctatgcgccgatcattccggtgaaccagaccagctgcgaggccttcgtgacccgtggcggccgaatccctgcgccgattcacagcttcaagaattgattcggtagggtatctgctttcagagaggtacatttggcccctcgcggagagctatctgctttcaaagaggtacctatatgcggaaaccccgggtatgagcgttggaatatcaacactcatacccggggtttctcgattgcggtacctctttgaaggcagatagcattctgcaaacgctcgaatgtacctctttgaaggcagataccagctcgaattacctttctggaggtctattcccgtttcgaggggctgattccgacctttctggaggtctacttccgtttcgaggggctggtatatatgaagaccccgagtacaagcattgatatttcaacggccatactcggggtctcgtcctttgacagccccttgaagcggcagtagacctccggcggatgccaaatccgcccctcgaaacgcaggtggccttatattcagcgttcatcactgcgcgaagctcagtgtttccgctctcgcgcctgtcggcgttcgttcggcgtcgttactcgaaggcccaccgggccttctcctcacgctccgcccgcaaaattgagctggcgccaggcttcgtagatggcgatggatgcgcagttggtgaggtttagggaacgcagggacgggcgcatgggcagccgcacttgttcggccacatgagggccctccatgatgtccatcgggtcggggatgtcgccgggctcggggccgaacagcaggatgtcagtcggcttgtattccacctcggtgtagagcttggtggcgtgcgcggtgaacgcgatgatgcgcgaattgggcatcgactccaccaggttgtcgaaattcgggtgcaacaccacgtgggccatgtcatggtagtcgaggcccgcacggcgcagcttggtgtcgcgcaggttgaagcccagcggctccaccagatgcagaatcgtgccggtcactgcgcacaggcggatggccgaaccggtgttgccgggaatacgcggcgagtaatagcacaggtgcggcgtcacggtttcggtggcggcggccttctcggcggaaagcatcgcgtccaccacggagatggggttgccgtgtgcgtcggtcaccagctcgtccggcccgtaattcgacttgcgatagccgtattcgaacattttctcgactttggtttcgggatttgctggattcggtgtgctctgggggttgtgttttgcctcgttcgtcatagctgctaagaataagaacgatgaacgacacagcaatttctttgcgattgggagcatggtgggaggccaatgcgcgtgacttgccatggcgcttcggacgggccacgccgtggggcgtgctggtatccgaagtcatgagccagcagacgcagatgagccgtgtggtgccgtattggaacgattggatggcacgctggcctgacgcccgtgctcttgccgcagcacctaaagccgatgtgatcaccgcatggggccggcttggctatcctcgccgtgcgctgcgattgcaggaatgcgcccgcgtggtggccgagcagtacgccgacaaactgccgcgtacgtatgacgaactcactgcattgcccggcatcggcgattacaccgcctccgcggtgctgagctttgcgttcggcgaacgaatcgccgtgatcgataccaacatccgccgcgtgctgagccgtgtgttccttggcgtcgaatcgcgcgggggagcggccagcccggccgaacgcgcgctggcgaaccgcatgctgcccaaagacgagattctcgggcgcgatgctgacgtcgccgataatgccggtagcgccgaacataccgtgaacagcactatccgtggcggcaaacgctcccgactgcatcgtggcgaacgcccatcggtcacatggaaccagtcggtaatggaactgggggcggtgatctgcacggccaaatcgccgttatgcgacacctgcccgattgccgacgattgcgcgttcctcaaggccggccgccccggactgggggagcgtcgcacccgcccacgccaacgattccaaggcacggatcgacaggtgcgcggtctggtgctcgccgcgctgcgcgagcttcccgctggagtcacgttgcccagggaagatgccgacaagctttggaaggaccagattcagcttgccgcctgcatcgccagccttgacgatgacggcctgatcgagattctggacggcggcctgcgattacccagctgacattgtgaaaatggcgggctccccaagcgtgtatgggtgtggtgaccgtagactggaagggttatggcagtgcagaggaacacatcaggcgcgagaacggcacgcggagccggcaccggggacaatgggccatccggcgggcccgcccgaaacgaccgttccggcaagccgcgcaagcgcaggatcagcaaaaagcagcaggccatctatcgtcgtcggcgtatcgtggccggcacggtgttgctgctgataatcgcgctgattgtattctgcgtgtacagccttggccggggtatcggtgccgtgaacacgatgattcaccatgacgaggtgtatgcgatttcccgcgacgccacgccggctccgaagaaagtcagcaatgtcaaggattgctcggccagtgatgtgacattgcagctttccgcggcctcccaatccgtgccggtaggaggatcgcttgatttcaccgcgaccatcgtgcacgaggggtcaggcaactgtttggtggac

SEQ ID NO: 3053 - DNA, 14483 bp, Unknown
  R19_24m  MAG No. k141_24112
accatcgagaagatcgacatcggcggcccctccatggtgcgtggcgcggccaagaaccacgccaccgtggccatcgtcaccgatccggccgattacgccttggtcgcctcccgcgtggccgatggcaccggcttctccctcgacgagcgcaagtggcttgcagccaaggccttcgcgcacaccgccgcctatgacgccaccatcaacgagtggaccgccaagcactggcccaagccggcctctctggacgccgtcgaggtggacaaggacgatcagggcactgaagtcgattccgccaagttcccggcccagttcacccgcacctgggatcgtgcgcacaccctgcgctacggtgagaactcccaccagcaggccgccctctacattgacccgctcaaccagaccggtttcgcccacgccgagcagctcggcggcaagccgatgagctacaacaactacgtggacgcggacgccgcctggcgcaccgtatgggatatggctcccgccattgccgtggccgtagtcaagcacaacaatccgtgcggtctggccatcggcgcgaccgcggccgaggcccacaagaaggctcacgcctgcgacccgatgagcgcctacggcggtgtgatcgcctgcaactccaaggtcactcttgagatggccgaaagcgtgcgcccgattttcaccgaagtcatcgtcgcccccgactatgagccggccgcgctcgaactgctgcagaccaagaagaagaacctgcgcatcctcaaggtggccgagccgccgaagggccacgaggccatccgccagatcgatggcggcctgcttgtgcaggacaccgatctgatcaacgccgtcggcgacgatccggacgcctggaagctcgtggccggcgatgccgccgacgccgacacgctgaaggacctcgtgttcgcatggcgtgcaatccgctgcgtgaagtccaacgccatcctgctggcccacgaccaggccacggtcggcatcggcatgggccaagtcaaccgcgtggactcctgccatctggccgtcgagcgcgccaacacgctggccgatggtgccgatcgcgccaccggtgcggtcgcggcatccgatgcgttcttcccgttcgccgatggtgcccaggtgcttatcgacgcgggcgtcaaggccatcgtgcagcccggcggatccatccgcgatgaggaggtcatcgaagcggccaagaaggccggcgtgaccatgtacctcaccggcacccgccacttcttccactgatcgggactctctgaggggagcagctcagccaaaacgcacaaaggtgggattccgcctgacccgtcaacgggtccaagcggaatcccacctttgctattcgcctgctattgtggtcacgtaaccgttcgacagaaggaatcgcaacatgcacaaccatccctatgtatccgaagcgcatgagggcaagccatggtttgaatggtgcgtactcggcgtcatcgccgtcatcacactgctggttgctttcggatatacgatggccgccacggtcatacttgccgtgacggccatcatcaccgggcttgttcgcctgattcttcaggacaaaagcccatggaaagtgcgctcagtggcgttcgactccttcatcggcatcgccttgggaatcggcctgctgattacctacttcagcttctttggactcttcggcaacatctttttccgctgaatcgccatcagacgaggcggcctgatcgaagaattcgccatcgtcgagcgtgtccgcgttcgcatcggcatccgtctgtggaagatcggcggcagccggcactttgggagtggtcatcatctgcgcgatgatcatgaccaacgccaccacagcggcggccaagaccgggctaatccagaacacccacagctgttgcagcggattttgcgtaagaccctcattcatcgcggccagtgcgataccggtggaacgggcgggattgagaccggcaccggtaaccgggtagctgatggcggcggccagaccataggcaagacccatggcaatgacatgacggtccgaggactcgccgtgatcacccagagaagacatggcggtggcaacgacaatcagagaggcaacgacctcgacgacaatcgccagcgtaatcgagaacgtgatgccatactgggtcagcagcgagtaagacacggagccgttctcgaaaccgttaacggccggagtcagccacactttggcagctacctgctcggatgtgggcagcagcttgaccacggcgaagccggcggcgatggcaccgatgacctgagcgatcacatagaggatgccatccaggattttcgtcttggaaaccagcacggaggctacggtgatggccggattcagctggccaccggacacgcgggagaagatggcggtgactgcggcatatgccaagccggtagccaacgcgaagaacacgatattgatgccatacacggccgaaccccatgtggagaaggcgtaaatggcaaagcacagcaggaagctgccggccaattcggcgcacacgcgcagggccagcggctgttgcttggtttcttccatgattgttcattccttttcatctgttggaagacgggcgaacccgcacaaacggttgccagtctagcagcagtcctacgttgcggtatgatatataggttggaattggctgggattccagtccgccaactctgaagtatgtatacaaatcgacagtctctgcgatgacagagtctgtccggccacgttgggagaacgatgccaaacgcatattcccgcgctgcgaaagcgcaagacgattccaattccattcgactccagaagctgcttgcccaagcgggattcggttcccgccgcaagtgcgaggacatgattaccgaaggccgtgtcgaggtcgacggtgaactggtcaccgagctcggaactcgcgtcgacccccataagcagcaggtgcgcgtagacggttcgcgcgtacgcgtcaatccgaaccacgtcactctggcactgaacaagccccgcaaggtgctctccgccatggacgacccgaagggccgctacacgttgcgcgacatcgtgggcgacaagtacgagcgcatcttccacatgggccgtctcgactacgattccgagggtcttatcctcatgacgaacgacggcgaactctcgcagcacgtcatgcaccctaagtacgaggtcgaaaagacctacgtcgccacactggaaggcaagatctccggcaccgtatgccgtcgactcgtgaccaccggcgtacagctcgacgacggctggatcaagctcgaccactgcgcgatcatcgactcctcacgcgaccacacgatggtcaaggtcgtgctgcactccggcaagaaccgcatcgtgcgccgtatcttcggctcaatcggcttcccggtcaagcgcttggtgcgcacccagatcggcccgatcaaactcggtgatttgaagcccggttcctaccgcgtgctgtcccagacggaagtccgttcgctgtccaaggaggttggcctgtgattcgcgttgctatcgacggccccgccggcgtgggcaagtcgtccacgtccaaggcgctggccaagtatttcggatacgcctaccttgacacgggcgcgatgtatcgtgcctgcgcttggtggtgcctgaagcagggcatcgatctggacgccgaaaccgtggatgagcgtgtcatcaccgaagcggtgggcgagttcttcaccggcgaccatttcgatatctccgtggacccggacaacccctgcgtattcgccgacgacgaggacatctccgaggccattcgttcctccgaagtctccagccatgtctccaaggtgtcgaacgtcatcccggtgcgcaacgtgctcatcgccgcccagcgcgcctacatcgcccgcgaggcgtcggccgactccttctccggggggttgggcatcgtggccgagggccgcgatatcaccaccgtggtgtccccggacgccgaggtgcgcgtgctgctgaccgcccgtgaggaggtccgtcaggcccgtcgcaccggccaggctgtcaagggcgtgggcgctgaggatgtggccgcgcgcgacaaggccgattccaaggtcaccagcttcctgaccgccgccgatggcgttaccaccatcgacaattccgatctggacttcgcccacacgctcgatctgctcatcggtgtggtcgaggacgccatcgagaaccaagaatacgagcagtatgccgccaatctcgaaggctatgagctggacgaaggcgatgaggatctgatttccggccgtggtttcacggaaggcgcgcgcaaggccggtcccaagccggtgggcgtgctggctgttgtaggccgtccgaacgtgggcaaatcatccctggtcaaccgtatcctcggccgccgtgccgccgttgtggaagacacgccgggcgttacacgagaccgtgtgagctatgacgcggaatgggccggcaccgacttcaagctggtggacacaggaggctgggaagccgacgtggaaggcattgaatccgccatcgcctcacaggcacagattgccgtgaccttggccgatgccgtggtattcgtggtcgatgggcaagtgggcatgaccaccaccgatgagcgcatcgtcaagatgctgcgtgccgccggcaagcctgtcgtgctggccgtcaacaagatcgacgaccaggccagcgaataccttgccgccgaattctggaaactcggcctcggcgaaccatactcgatttccgccatgcacggcaggggagtgggcgacctgctggacgtcgcgctcgacaagctcaagcaggccgagaagacttccggctacctcacgccttccggcctgcgccgcgtggctctggtgggccgcccgaacgtgggcaagtcgtctctgctcaatcagctggcgcgcgaagaacgtgccgtcgtcaacgatttggccggcaccacgcgcgaccccgtcgacgaaatcgtcaacatcgatggcgaggactggctgttcatcgacaccgccggcatcaagcgacgccagcacaagctcacaggcgcggaatattattcctctctgcgcacgcaggccgccatcgagcgctgtgaattggcgctgattctgtttgatgcctcgcagccggtatccgatcaggatttgaaggtcatgtccaccgccgtggatgcgggccgtgcaatcgtgctcgtattcaacaagtgggatgcgatggacgagttcgacaagcagcgtctcgaacgcctgtggaacaccgaattcgaccgtgtgatgtgggccgagcgtgtgaacctgtccgccaagaccggctggcacaccaaccgtctgacgcgagccatggataaggccttggaatcctgggatcagcgtattcctacaggcaagctcaacgccttcctcggcaagatccaggccgcccacccgcacccgttgcgtggtggcaagcagccgcgaatcctcttcgccacgcaggcgtccacgcgcccgccgcgtttcgtgatcttcgccaccggcttcctcgagcacggctaccgccgctacatcgaacgctccctgcgcgaggaattcggcttcgaaggcacgccgattcagatctccgtgaacatccgtgagaagaagaagcggaagtgacacgcgcgtaatttgccagatttcatatatctggtagattatctactcggtgcttttgcaccatcgggccgtagcgcagtttggtagcgcacttgactgggggtcaaggggtcgcgggttcaaatcccgccggcccgaccgattagccccggaattccgccacttctgagtggttgctttccggggcttttccgttttcagacaacatgagacaacatgacgacggacttacctttgtaagccattcgtaatggattaaacacggacttcatcttggcgtgttattggaattatcaccgacaattcaccgcctccgcccccccgtcgtatgtgtttgccccaaacaggggctagactggttcctattgatttgatgaaagggacccgaattgaccgaaataaacgataaggcccaactggatatcgccgccgctgacgacaccgacgccgtcacctcggatatccccgaagaaaccgtaaacacccccgaagtggatgagactttcgagctttcggccgccaagatgcgcgagcacggcatgagcgaaaccgccatcaaccagttccgccatttgtatgacgtatggcgccatgaagaagcctccagctggattcgtgaggacgacatcgagccgcttggccacgtgcccagcttccacgacgtctatgagaccatcaaccacgacaaggccgtggacgccttcgccaagaccgcattcctcaagctcaatggcggtctgggcacctccatgggattggacaaggccaagtcgctgttgccggtgcgtaggcacaaggccaagcagatgcgcttcatcgacatcatcatcggtcaggtgcttaccgctcgcacccgcctgaacgtcgaactgccgctgacgttcatgaattctttccgcacttcggcggacacgatgaaggcgctcaagcatcatcgcaagttcagccagcatgacgtgccgatggaaatcatccagcatcaggaacccaaactcgtggccgccaccggcgaaccggtgagctaccccatgaacccggagctggaatggtgcccgcccggccacggcgacctgttctccaccatctgggagtccggcctgcttgacgtattggaggagcgcggcttcaagtacctgttcatctccaattccgacaatctcggtgcacgcccctcgcgtacgttggcccagcacttcgaaaacacaggtgccccgttcatggccgaagtggctatccgcaccaaggccgatcgcaagggaggccatatcgtgcgagacaaggccactggtcgcctgatactgcgtgaaatgagccaggtccatccggatgataaggaagcggcccaagacatcgccaagcatccttacttcaacaccaactcgatctggattcgcatcgacgctttgaaagacaagctcgccgaatgcgatggtgtgttgccgttgccggtgattcgtaacaaaaagaccgtgaatcccacggacccgaactccgaacaggtgattcagctggaaaccgccatgggtgccgcaatcggtctgttcaacggttctatctgcgtccaagtggatcgtatgcgcttccttccggtgaaaaccaccaatgatttgttcattatgcgttccgatcgcttccacctgacggacacgtatgagatggaagacggcaattacatcttcccgaacgtcgaacttgatccgcgatactacaagaacatccgcgatttcgacgaacggttcccctacgccgtgccatctttggccgcagccaactcggtttccattcagggcgactggacattcggacgtgacgtcatgatgttcgccgacgccaaacttgaagataagggtgagccgagctacgtgccgaacggcgaatacgttggcccgcaaggcatcgaaccggacgattgggtgtgatttacaacacggtcgaacgataaaaaagatattatttttgtgaaatggcgctcaactgtggaaaaagcctctaagatagagtgagtgtggggaaactcatacgcacttataacgaaacaataactatacgtgaggactaatggcagagggcacaagcggacgtcggcgtttttccgacaaatggggcaagcacgagctggacgtactggctgtgttgtcatccgcgttcccgcaatggctcacatcccgccaaattgcgcagcgcgtcaaggcttacgccgactcgtatggagagctggcagatcaggccgccaaggccgcgttcgccaagcagttccagcgtgatcgcgccaagctcgctgcgatgggcattgccatcgaatcacggcagcctgagtactcgtccaagtcggaaggccaggacttcgcgtcctatcgtctgcagttgggcgacgaaccgcgtatccgcctgatgttcgagccggaagatatgccggtgcttgccgccgccaactatctggctcgttcgatgtcgatttcttccgagccggatcagtcccagctcacccagcatgtgtcgcgcactacgccgcgtgtgccgcagaccccgattcccgggcttggcttggattcgattgcgcctggcttggggacgcagcccattccggattcactggtcaaggttattgattcgcgtcgtttcgccgccaccgttgacgtggatggcgaacacctgaacgtggcatacaccgattccgacgatttggccatgtttgtgcttgagcatccgggggccacgattgtcagcccgcaagaggctgtggacgcttatcatcgccgtttgcacgccgccagccggttcactctggccgacgaatccgccagtcctgtgagcgcttcggtggtttccccgtcgattagtcgcgatgtgcgagagccgggtgatcccgagtctatcaaggctcagaacaagaagaacggctccgctttccaaacgggcagtgaggttgatcgtcgcctgcgtctgatgctgttcctctccgctcatctgggtgaggaattctcgatgagcgagctgggcgaacgctttatcggcaagccaaagaacgatgatgaactcaagaaattcgtcaacatcatccataaggacatcaacaccctgaccaccgtttccgacgatggtgagatggccggcagccagttcttcgatattgactggccgctgctggatgccgagggtattgtttccgccaccaattcgctgggccttgaacgtcttgccggcatttcgccgcaatacctcagcatgctcaccgcctcggtcagctacctggcgcattcgccgttgctgccggacaagcagcgtgggcaggccgaatccctgtatgagcgtttgcgccgtcatgtcagtcccggtcagaccccgtggctgagcctgaccggctatgagctggagccccgaagcttctccatcgtcaagcgtgcgatcaacaccgattcgctgttggacatggagtacaccgacggtacaggtcgtacccgccgcaagctggtggcccccgccaagatcttcattgacgaaggcgtgtattatgccgccgtctacacggacgttggttccgccgcacccaaggacaaaaaggcctacgtctccaaagacaagaccctcgacaaggccaacggcaaaccgcgcatctggcaggtactgcgattggcccgtatcgaaaaggcggaactggtcaagcccaccaagcagatcaacatcccgaacatgccggtgagcgaactgcgcaagtggagtttcgacaacggtaccgacgcggtgttcatcaccgatcagcgcgatctggcattcatcaagacattgccgggcgctaccgtcgaacaatgcggtgccggtgaaaaggtgcatctgaccgtttcctccgattcctggttcgtggccttctgcatcgcccacgcgcgtcatatcacggcggtcgccccggaaacgttgcgcaccatgatcgtggcacgcgccgaacgcgaactgagcatcagcgagaacaagtaaggagcctttcatgccttggtggatatggctgattctggccctgttcatgctggccatgattgttgccggactcatctatgcagcccttcatggactccgtgccttgaaagacatgtccgacatcggcggccaactcggtgaacgcgtggccgcgatgggggagcccggcacctctgccgacaccagcgagccgcctctgttcactcagccgctcagcgtggcacagaatcgttatgccgaggcccatgcgaacgtgattcgcagcaaggccgccaagcgcgaacgccacacccaggcatgggcccgctggaagcgattcaacaactaacggaaagcagcaatggcacgtcaccaacaccataagggcaatgccgattcccagacgctgagcccttcgcagcggtacgcatcattccaaaaggtccaacgccatcgggcgtccgcagcagcgcgattcgccgaatccctgcctttcgaactggacgacttccagaccgaagccaatgacgcgctcgaagccggcagcaacgtactggtcgcggccccaaccggtgccggcaaaaccgtagtggcggattttgccatttacctcgcccaggaacgcaacgtcaaagccttctacaccacaccgatcaaggcgttgagcaatcagaaataccatgatctggtcgacgtgtacggcccggacaaggtaggcctgctcaccggcgacacctcgatcaattccgaggcggacatcgtggtcatgaccaccgaagtgctgcgcaacatgctctacgagcgttccaccacgctgaacgcactgcgctacgtgattctcgacgaagtgcactatctggccgaccgattccgcgggcccgtgtgggaggaagtcatcatccacctgcccaagacggtcaagatcgtcggcctgtccgccaccgtgtccaacgtggaggatttctccaactggattgcctcggtgcgaggcgacacaaaactggtgatcagcgaacaccgccccgtgcctttggaacagcacgtcatcgtgcaggcggacgaacacaccgagcccgaggtgctggacctctatcgccgcgacggcaacggcgagcagaccaccaaactcaacgccgaactcatcaaccggctcgaccagttggaccgcaaggccgcacgccggcgcggcgaggaacgccccgataagcgcaagggcttcggcagaggccgcggcggcaaaggcgccaaagaccgtgctccgaaagcggaacgccacaccccgcgccgctgggccgtggtggacgagcttaacttcctgggaatgttgcccggcatctacttcatcttctcgcgcaacggctgtgaccaggccgtggaacagtgtatcaacgctggactggagctcaccaccgatgaggaagtgaccaggattcgccgcatcgtggatgagatggtggaggggcaactcactcaggaagacctgaaagccctgcagttctccaagttccgctttgcattggaagaaggcttcgcttcgcatcatgccggcatgattgccctgttccgtcagatagtcgaacgattgttcgaagaaggtctggtcaaaatggtgttcgccacggaaacactggcattgggcatcaatatgccggcccgctgcgtggtggtagagaaactcgaaaagttcgacggtaccggtcatgtgggcctgacgcccggcgaattcacgcagctcaccggtcgtgccggtcggcgcggcatcgacaccatcggccacgccatcgtggtcgaccatcacggttttgtgcccgccacggccgcctcgctgtcatccaagcgtgtctacccgctgcactcgagcttccgacccacgttcaacatggccgtgaacctgctcaactccagcgactacgagaccgcgcgcgtcaccctggaccagtcgtttgcccagtgggaggccaacgaatcggcctggcagctggaatcgcagattaacacactgaagaacgcgctggccggatacgaacaggcgttcgcatgcgaacacggcgacttcaaacagttcatgaccctgcgtatggagctgagcgacatcgaaaaggaaggccgccgcaaactgaagcacgaagtgttcctgaccgatcaggagcgttcacgcgctttccagaacctcgaccagcgcattcgcgatttgcgcaaggcggaacacgagcatccatgccgcaactgcccggacctccagcaacacctcaaatggggccaccgctgggcccgcgagactcgagaactgcagcgcgtcaccgatcgctacgactcccgcaccgggtccgtggcacgccagttcgattgcatctgcgatattctcaccgggcttggttacctcgaacgtcatgtcaatgcggccggccacattgacatgacgttgactgacaaaggtctgctgctgcgccgcatctacagtgaacatgacctggaactgtgcgaggcgctgctcgccggcacgttcgacaagctcgacgccaacggactggccgctgtgctctcttcactggtatacgaggccagacgcgggggagacggcgaaccgaggcactacccgggcggcatctccgggcccatcgccatcgcttcgtccaagctcaagggcatttgtgaagacatcgatatcctgtgcgaggatcacggtctggacgagatgcagcggccggatttcggcattctcgacatcatgtatgaatgggcggatggcggttcgctgggatcgtgcctgtacggcaccgacatgaccggcggcgacttcgtgcgcactgccaaacgactggctgacgtgctgcagcagattgctgtcgcccagccgctgccgttcgacgggggagagcggctggcaggcctcgcccacgaagcggccgaccgggtcaatcgtggcgtggtggcctactccggcgtggactgacggggctgtttgacgggagtttgtcagccgacgtcggaagcttggaatagcggccaagtccgaactgttgcgtaaattagtagggttaaagatctttcaaggaggatgccgatatggcagaacgtagcctcaggggcatgagcatcggagcgaaatcgctggagtccgacgacaacgtcgatttcgccgcgcgaaacgatgtggcgtatgtatgcccgaagggccaccgcaccatcctgccgtttgccgagggtgccgaaatcccggacgagtgggagtgccgttgtggttccgtggcccaccgtgagggcgacgccgaccgtgagggcgacgaaatcagcaaacccacccgcacccactgggacatgctgctggaacgccgtagcgaagaggaactggccaccctgctcgaaaagcgcctgcaaatgcaccgtgacggttggattcccgactacgagtgatctcctactgaacaacacgtgaacttgatgcccagtcatcccgactgggcataatcattgttggaacaagtcgcattgtttgacgaccattcaaagcagtcgacatgaacaagggggagtggaatctcaatggcacagcatccgatgaaagtggtcctgttggatctcgacggcacgcttaccaagtccgacggcggcattatcggctccgtcatcaagaccttcgaagagatcggtcgaccggttccggacgccgccgaactgcgacgcttcatcggaccggcgattattgaatctctgcgtcgcaatcatgtgcctgcggaagatctggatcgggccgtggacatctaccgcagctactacggagaccgtgccgtgttcgacgatccgaacgagcccggcaacaaggtgcccggacgactggtgaacgtcgtattcccaggcatccgtgaacagctgctcaaactgcatgccgacggttactacctggcactggccagctgcaagcccgaataccagtgcatgcctatctgcgaccatttccacctgaccgaactgttggacggcatctatggtgcttccaaagacaattcccgtctggacaaagatcaggtgattcggtactgcttcgacaaaatcggttttgatgctgcagcgggggacagggccgtgatgatcggcgaccgctacaccgacattgacggcgcccacgcctgcaatttggacgctatcggctgccgctggggctacgctccgaccggtgagatggaggaacacggtgcctacgaaattattgagcaacctgagcagctcgaagacgccgtaaaccgttatttccaaacgcactgaaacacaacggcgaggacttcttcatgatgggatgcgatggagcctgcgccgcgggcttcgacctggttttcatcggtttgccattgctgtcgctgtatgagattcccatgctgatatggttcatttggcgagcattccactggaaacgagatgacaaggattggctgaaaggcacggcgattcttgcaattgcggtggtagctccggtgctcctttggctgtcggccttttggctgtcggcctggtatgcgtggactagttgatacaggcgactgaatcctcgtcaaggataactaatctgacataacgtacattatcggctaactattcgggaatcttagaaacggcttaatttcaacggtcttcatttcgcacaggtaactgtggatgcctctgggtggcccgttgtggctacgcatttggctacgcatttcacacgacgggagaccaacgatggcaatgggtggcggcggctcgacatacagaagcgccgatggaatctggcacgccgcgatagacatagagcccgacagggccaccgggcgcaggcggcggctcacggcccaaggcaagaccaaggcggtggcgaacgc

SEQ ID NO: 3054 - DNA, 5936 bp, Unknown
  R19_24m  MAG No. k141_24475
atgctgctgtccgatcgcgatattctcgccgcacagtccgcaggtcatatctcacttgatccgtggacccccgaaatggtgcagcccgcttccatcgacgtgcgattggatcggtacttccgtttgttcaataaccacgcctacacctatgtcgatccggcggaaaaccagggcgcgctcaccgaacagttcgaggtggatcccgacgaaccgtggattttgcaccccggcgagttcgcactgggttccacgtgggaatacgtcaagttggacccgtccattgccgcccgtctggaaggcaagagctcactgggtcgattgggtattctgacccattcgactgcgggcttcattgaccccggtttcgaggggcatattacgcttgagttgtctaatgtgtcgacgctgccggtcaaactatggcctggcatgaagatcggccagatgtgcttcttccagctgagctcgcccgctgagcacccttatggctccaagggcaccggctcgcattatcagggccagcggggtccgacgccgagccgttcctacgagaatttctaccgcgcgcacatcgacgactgagcgttgcgacgtaccattcggccggcggatgccggccatttgcttaatcccaaggagatgtcatgaccaacagcgatggtgggttccagttcgacttccagcagcacgaaaagccggtcaagccaacggttcctccgattcccgggcaagagacggcagcatatggcgcgcagccagcgacacaagccacaccggctctgcagttcccgcaatctgtgcaggcagcacagccgacgcagtttgcacagcccacacagcccatcgatccggccatgacgcaaccgttctcgccgcaattcccggctgcggttgccgcacaagcaccacagccggcggcagccacgcagccagtagtatccgaaacaccaatcgccgctgcgcccggccagcagcaatacgtttgggatcagacgacgcaaagcttccgcccggtggaaccgacagcgccggtgacgccagccgcaccagcggcaccggcgacatcgcctgtttcggtagcttcaaacgccgcgacacaggcgttccaacccaatcaggccgagcagcctgcggtagatgccgaggcaacacaagcattccggcctgatcaggtcatggcaacacagcttttcgaagctcaggccatgccgaatgccgaaaccgcggccacacaggcattccagcctaattcagctgcggccacacaggcatatggcgcatcatccaccgtatccggtgagaccgttgccatgccggcaacgcaagtagcgtctgccgatgatgctgcagccacacaggtgttccaaccggccgccctggccgcttcggcacaggctcagcctgctgtgatgcctccctccattccgttggctcaggtctccgatgaggacgattccgatggcgccgagcctcgtcacggcggtagcggcaaaaagaacaccctcaaaatcgtcggcattgccgtagcggtagtcgccgtgatagcgctggttgtcgccggcctgctctggtggcattccaacagcagtaaggcgagccaagccgtggcactggccgagtgcaaggtagcggccaagcagtacacgaatgcgcagaagaagctcaccaccgccatatccaatggccaaaccagcgcgcaaacatccaccagcgatgtggccgatgccaatacgctcaccacgctgaatcaggcgttgcaagacgccggcaatccggctgacaccgccaagtgcgattccagcctcaacgccactgagctgaagtctcacactaaagagctgcagaatgacgccagcgacatggctgacaagacggatgccatcaacaatgcgatcaaggccgttaatacttcaaaggcgacggccgataccgacacactgaaatcgaacctgagctcggctatttcgcaggcgcagggcacactggatagttccgcgggcagtgtggccgatgagaacacccgcaccgcgctgcaaaacgccatcaccgaggccaatacggtgatgaacgggaccagtccgtccgaatccgacgtcaacaatgcgatttctagactgcagaaggccgagtccgacgtcaccgcctcgatacaggccaagcagcaggcagatgccgccaagcaagctcaggaagaggctcggcagaaggccgaccaagaggcacagcagaaggccaagcagcaggcacagcagaagtctcaagacgggtccacctctactgacggccccgacggcagcaacaactgaggtctgcagcgttctcccgtttcccatggggcggtaacttccccatggggcggttagcgcattttcctttttcgcggaataatgccgttttcagcgaccgccccatgaggaaatcaccgccccatgggataatcaccgccccatgaggagccgtttggatatagcagtgggccgggccctgaataccagagcccggcccactgctatatgcccacaatcagggctattgcgatggcttaacgcttggctatcgcgcgtagcacaatcttgcgtagctcggaggcaatcagcacgattgcggccaggcagatgcattccacccaagccatcgggctcaatgccacggtgccgaacggaccgttaaggaacggcacgtaaatcaccacgagctgcagcgccacggacaaaccaatcgcaccccatagccacttgttggagaacagacccacgaatgcggactgcagatgcgaacgggaggccagcgcgttgaacagctgggcaaacaccagaatcgtgaagcccatcgtacgggcctcggtcatctgcgcttcatggccgatggcatccaccgagcggtcggtgaacaagccgccggataggtgcatgtccataccaatcaacgtgacgatggccataatgacgccgacgaagatgatgtcgccccacatggaggcgtcaatcacgcggtccgtcaccttacgcggtttacgacccatcacatcgtcggtctgcgggtccacgcccatagccaacgccggcgcggcatcggtcagcaggttgatccacagcaactgtgtggcgagcagcggcacggtgacgcccacggtttccggctggcggatgccgaggaagccagcaaacaccacaccgaggaacacggtgaacacctcacccacattggaactcagcaggtagcgcaggaacttgcggatgttgtcgaagatcacgcgaccctcgcgtacggcggccacaatggtggagaagttgtcgtccgccagaatcatcttggcgctctgcttggtcacttcggtgccggtgatgcccatggccacgccgatgtccgcggacttgactgccggggcgtcgttcacaccgtcgccggtcatggccacgatgttgccttgacgctgcaaggattcgacgatcttgagcttgtgctcgggggccacgcgcgcgtacacggacacttcggacgtggccttgtcgagtgcggcctcatcgggcagctggtcgagctggtcgccggtcagggccttgccgtccttggcgatgatgccaaggtcggaggcgatgcgggcggcggtcagcgggtggtcgccggtgatcatcaccgtgcggatgccggcacgatgggcctcggtcacggagtcgcgcacctcagtacgcggcggatcgataatgccgaccatgccattccagatgagatcggtttcgatggcttcggcctgatcggcgatgtcggacacctggcctgcggcgttgacgcttacaccgggcacatcagccaaagaactggtttccagcggacggcaggcctcgccaagcgtacggtaggcctcggaggagagacgttcgacggtggcgagaatcgactggcgatcgccttcggtgagcttacggacctgaccacccacgcggatgcgcgtgcagtagctcaacagcacgtcgggcgcgcccttggcgaacacggtgagcttgtctgaatcggtgctgtccttggcgatgatggacatgcgcttgcgttcggaggtgaacggaatctcgcccacgcgcgtgtatcgcgtgatcttgcgatcggccttgactttgcgggcggccacgataagcgagacttcggtggggtcgcccacgatctcccagcggccgttctcctcgcgtagttcgccgtcgttcgcgagcgtgccggccacaagcgtggcgacgacttcatcggccacaatctgggcctgctcggattcaggactgacgccaccggtcataaccatgcggccttccggcgcgtaaccggtgccggtgatctgcactgcgccggacggggtgaccacgcgctccacggtcatctcgttgcgggtcagcgtaccggtcttatccgagcagatcacggaagcggagcccaaggtctccaccgaatgcagtttcttgacgatggcgttgtgcgcggccatacgctgcacaccaagcgccagcaccacggtcaggatggcggccaagccttccggcacggcggccacagccagcgagacggccaacagcaaggaatcaatcacgtcatggacgtcgtcgaagccttccagcacggcgagcgccaccagcaccacgacagcgatgacgcacaccgcaatgccgaggatcttggagacgtaatccatctccttttgcagcggggttttctcatcttcggtggcggagagcatgtcggcgatcttgccgacctgcgtgttcataccggtgccggtcacgattgcgcggccggtgccttgcgtcacggaagtgccgttgaagatcatgttggcacggtcgcccagcgccttggcttcggtgagtgtgtccggcttcttaccgaccggcacggattcgccggtcagggaagcctcggcgatgcgcaggctggccgcgttgaccagtcggccatcggcggagactgagtcgccttccgcaaggacgatgatgtcgccggggaccacgtcggcggtgttgatgcgcatgactttgccgccgcgcagcaccgaggtctgcggggccgtcatttgggcgagcgcctcgaccgcggcctccgccttggcctcctgcatgtagccgagcacggcattgacgatcagaatcaaaatgatcacgatggcgtcgaacggcagcacttcaccgccttccgcgccgggctgcgcattggccttttcgatgaaccatgcgatcaccgagatgatggtggccgcgatcagcaggtagaccagcgggtcctggaactgggccaggaatttcttccatttcggtacgggcggggcggtggcgagctcattcgggccgaatttggccagtcgacgcttggcttcttcctcgctcaggccctgggatgggtcgacattcagggctttggccacgtcgtcggcactggtcagacttggatcagcttcccccaatagcgcttcctgcgcgcgcacttcttccgattccacgacctcgttcgttgcggtcgcggacactgcggattgatctttgagatcatccataatgttctccttggtattgccgcggagtagtcagccttgcggccgctgccgggttttctctcccggctggacgcacaggactgcgcggttatggacaccggcgcaactgctgccgatgcatacgattgctattattccataactgcgtggcgcacttggcgcacagcgtaatagcgttttgcctagaacaggcgacgcaatcaggcttcagccaaatcaggccaacactgcacgcattcgacgatgtgcgcatagaagccgttgccagcggtttccgcattggccagggacaggccgtggctgccttcggggaacaggtgtgcttcgatgctcacgccggcggcccggcaggcctggatgagcattagcgtattctccacgggctcggcttcgcggtcggaggtca

SEQ ID NO: 3055 - DNA, 11082 bp, Unknown
  R19_24m  MAG No. k141_24675
atgctgcgccgcatccgcatggaggacgccgcccaggcatccgagatcttcagcctgctgatgggcgacgacgtgccgccgcgcaagcagttcatcgtcgacaacgccgacgatttcgaccgctccaagatcgatacctgatcgaagacgtcgctgataatgacatcgtgcttaccgagaatttccgtaattggcgtttgaggtgagcacgttgtcatatgttttatgcgtgttgcccatgagtcattcgatagactgatgacatcgttatcacaaccggtgccgtactgtgaatgggagatggaacatggccagtctgttgcttgccgtcatctatgtggcgtttatcagtctggggttgccggattcgctactcgggtccgcatggcccaccatgagccaggatctgaacgtgccggtggcgtgggctggcggcatctccgcggtgatttccatgttcacgattgtctcggcgctgctttcggaccgaatgacattgaaattcggggcaggcaaggtcaccgccgtttcggtggcgttgactgcggcggccttggcaggtttctccgttgccccgaattactgggtgctgttggccatcgccataccgtacggccttggcgcgggtggcgtggatgcggcgctcaataactacgtagccattcactacgaaagccggcatatgagctggctgcactgcatgtggggcgtcggcgcatcggtcggcccctacatcatgggctatgcgctgtctcaagggcaaggctggccgtggggctatcggtacatcgcgatcctgcaggtgatgctgaccgtcatcctggtgctgagcctgccgctgtggaagaaacgtggcacgaccgggggcggcgaatcgaccgatggtgccgcatcatctgacggcaatgccgagggatgtggtaatgctgaaggggcgtctgttgctgaacgcaaaccgctcggcgtggccggcgtgctcgccattcgcggtgccaaggaaatcctcgtgatgttcttctgctactgcgccatcgaatccacggcgggtctgtgggcctccagctacatggtgatgcacagcggcatcgacaagatcaccgccgccagctgggccagcctattctatgtaggcatcaccgtggggcgtgcgctttccggctttctgaccatgcgattcaaggacccggtcatgattcgcctcggccaagtgctggtgctcgccggcatcctcaccatgttcgtgccattgcctcaccaccttggcgtggtcgttgggctggtggtcatcggcttcgggtgcgcgccgatttatccatgcgtcatccactcgacgccggcctacttcggcgaagacaaatcgcaggccgtcgtcggcgtgcagatggcctgtgcctatgtgggctcactgctcatgccgccactgttcggcatcatcgcgcaatatgtgacaatcagtctctacccgtggtatttgctggtgctcttggtgctgatggtggccatgcacgagcgtcttcgtaagttgcgcggctgatcatgcgcgcatttgggcccgccgcctactatgcttggagcccatggtgataagtgaagaagaacataaacagatgcccgagcccgtacgggaacgattggaagcgctgaaggatgcgccgggctcggtaatcgtggtcggctcgatgaacgccgattacaccgtgaccaccaaacgactgcccaagccaggcgaaaccgtcaatggtggtgccatgaaagtgttgccgggcggcaaaggcgcgaatcaggcgtctgccgctgctcgcctcggtgtcaatgtccagttgctgggcgcggtgggcgaggactccaacgcggacttcctattaggcaagctggatgaggccggcgtcgacaccgccgatatcctgcacgttgaaggccccagcggcaccacggtaatcaccgtgagcgctgagggcgagaataccatcgtctattcgccgggttccaatgccaaggcaagtgccggctatgtgcaatcacatcgcacgaccatcgccgaatgcgcggtattgggactgtgtttggagagcccgatctccaccgttatcgccgccgcacagaccgcgcatgacgctggcgtgaccgtgctgctcaacgactcgccatttatggacgagctgcctcacgaactggtggaagccacggatattctgctggtcaaccagcatgaagtggctcagttactgggtctgccggacggcgatgtggaatcactcgactggtatgaggtcgccgaacgattcaccgattacggattcgaccgggcgatagtgacgcttggtgcgtcggggtcggtggtgatcgagaacggacgttggcatcgcgtatccgccgcgcaagtcaatgcggtggacaccaccggttgcggcgactcgttcatgggaactgtgctggctggcttggccgctggccatacgctgctgcaatccgcgcaaatcggctcctatgtctccgcctatgcggccaccaagcttggtgcccaaagcgcctacggcaccgccgaagaagtcatcgcctacttcagctgacctataatcgtacatatgtacgaaaccctgagcctgttttccgaacccaccaaggtgtggttcgagcatgccttcggtcagccgaccgaggcacaggctcaggcatggccggcaatccattccggtcgtaatgtcttggtcatcgcacctaccggctccggcaaaacattggctgcgtttctctcggccattgaccggctgatgaccgtgccacgcacgcggcgtgccggtgtgcgtgtgctgtatatctcgccgttaaaggcgctcgcggccgatgtggccaagaacctagaacagcctttggagggcattgccgcacaatgcgaggcgcaagggctgcccgtgccgaagatcgcggtcgtcactcgttcaggcgacaccaccgcacaggagcggcggcgcatagcctcccatccaccggatatcctcgttaccacgccagaatcgttgtatctgttgctcacttcgaaggcagggcggattctcggcactgtcgatacggtgatcgtcgatgagattcatgcagtggcgggcaccaagcgcggcgcacatctggcggtaagtctggaacggctggagaaccttgtcgcggaatcgcgcaagcgagatgcaatcgatgcggatgctgatgagggcagtgataccgccatcgatgctggcctcagtgaccttcatatgcagcgcattggtctatccgctacggtgaatccgcctgaagaggcggcgcgattcctgggcggcggacaaccggttaccatcgtgaatcccggtgggcggcctgcaatggatctgcgcatgattgagccgttggaaaacatgcgtgatttgcagtccgtgaatgccaagcagcgtgtcggtggcgtggaggctgaacggtccgctccgcatatcagcggtgtcacgccggccatgcagcgacttgccgaacgcaggggcattgtgccggtggatgatagagatgtttcttccacttctggggacgattctgatgcgagtgatgcgttcgattcctccgcgttggttggagcggcgggcgaccgtacctccggttccatctggcccgtggtggaacgcagtattttggatgagattctcgcgcaccgcaccacattggtgttcgtcaattcgcgtggtgtggccgaaaagctcaccgcgcgcctcaatgatctctatgcgcagacccggcatggcaccaatcccgacactgtgcgtgatccgggctctccggaaggccgcgaagggttctccacacattacgatgctgtggtcggctccaccaccatgcttgtcggctcacatgagggcgatgatgtcatcgccatggctcatcatgggtcggtctccaaagatcgccgcaaaatgattgaggaacggctcaagcgtggtgaattgcgctgcgtggtggccacctccagtttggagcttggcattgatatgggttcggtcgacttggtgattcaagtcgatacgccattgtcggtctcctccggattgcagcgtgtaggccgtgccgatcatcaggtcggtggcgtctctcacgcattgttctacccgctcacccgtcagcagattgtcactggggccgcaagtctggaagccatgattgccggcgatatagaaccattggccgtgccgcgcaatccgctcgatattcttgcccagcagaccgtggccgctgccgcgatgcatgatttgaacgctgatgactggtatgccacggtgcgccgtgctgcgccgtttgccgaactgccacgtgacatgttcgatgccgtaatcggcatgatgtccggcgaatacaacagcgaggaattctcggccttccggccgcgactggtatggaatcaggataatggcctgatttccgcccgtcccggttcgcagaaagtggccgttacctctggcggtacgattcccgatcgagggctgtacaccgtggtcctgcctgaggcggacgccggcaaaggccagcgtcgcgtcggcgagttggatgaggagatggtctacgaatcgcgcgtgggcgatgtcattacgctcggcacctccacatggcagattcaggaaatcacccgtgatcgtgtggtcgtgactccggctccgggccgcaccgcccgtctgccgttctggcacggtgaaggcgctggccgtgactacggtttcagccgtaccatagcccgcttcacccgagaaatcgccgccggattagacgtgaagcggactggggggagttctgccgcagaaggtccagctgtcccaaccttcatcccaacaatcctcacccgtctccaccgagacggcctagaccccaacgctatcaccaacctggcccgcctactctccgagcaacaagccatcaccggcacagttcccagcgaccaaaccctcatcgtggaacggacccgcgatgaagacggcggctggcgcatcgtactgttaagccccttcggccgccgcgttcacgaaccgtggtccatggccatcagccgcagactgcgccaacgctacggtttcgatgggcaggtatatgccgccgatgacggtatcgtcattcagctaccggacggtgacggacatattcctgctcaagacctgttccttttcgacccagaagacctcaaagcagatgtagaacgtcaagtgggcgagtccgtgctattcgccgcacgattccgcgaatgcgccgcccgatcactgttcatgccgcgatccgatccgggccgtcgcgtgcccctatggcagcagcgactgcgcgccgcacagctcctgcaagccgcacgtatggtcaagaacttcccgctgctgctggaaaccgcgcgcgaatgtttgcaagacgtatacgacatgcccgccctgaacgaggtgatgaccggattgcaagccggcaccattaccgtgaaggacgtggagaccgagccgccatcgccttttgccgagaacattctctttggcttcgtcggcgtggtgatgtaccagtatgaccaacctcaggccgagcgcagcgcgcaactgttgtctctcgatccgcacgtgctcgaacgcttgctcggcaccaccgacatggcacaagtgctcaacccggacgtgattcgcggagtcgaacaggaactgggggagcgcactttctggaatgaacttgccgacgatgatgtgactggtcgcgtgacccgttacgccaaaacccatggtcctttcaccgccgatcagctcatggacgatctgcacctcgatgctacggatgccgtgcatactttggatgtactggctgccaaaggcgagttgctgcaaggccactttgtagatgatgacaagcaaggccaacagtggctccataaggacgtattccgccgcattcggtctcgctcattggccaaggcgcgtaaagcagtcaagccagtagaaccagaggcgttccagatgtttcttatcgaccgacaaggtatcgggccggtcggcggcgaacgatatgaaggtgccgacgggctcatgcgcgttatcgagcagctggagggcatagcactgcccactgcactctgggagtcggcggtattccccgcacgagtacgagactaccaacctgcattgctggatgagttgctgaccagcggcgatgtggtctgggtcggctcaaaaaccgggggaaccagtgcgatggaccccggtgaggttgctttctatccggcggattcaatattgctcagcggtgtggaacatggtacgacatcgaacgcttcagacgccaccatgccggaagcgattctgaccgcattggactcagggggagcgttccatgcccgtcaactggtggatgccgccaaacgtgtgtggaatgaggccgcggagccggacatcaatccaaacaccggtgaaatcattccgcaagagtggagcgaacagcagttcaaggatgccttgtggagcttggtctggcaaggtaaggtcaccaattccagcttcgcgccggtacgtgcattaaccgcaggcgcagcaagcccgcgtaaatccactacatcacgtcgtcgtgggcgtgtcgctccgattcaccgagccactacggatatgacgttaggaggtttgtggtctgccgtaatcgggcaagctgaagccgaagacactgatcagaccgagcaggcgctcgcactggtcgagacgttgctggacaggtatggcgtcatcgcgcagccggtgatcgacaaggaaaatatcccgggtggctactcagcgttgtatccgatattgcagcgcatggaggagcatggtcgactggtacgaggcatgttcgtccgtggtttcggcgcggcccaatttgccgagcgcgacaccgtggatgcgttgcgtcatccgtcagagcctcgcggccagtccgtggtggcattgagtgtgctcgaccccgcaaatctcagtggctccgccatcgcgtggccggacgcgcctgccggtgcgggtaaaccggcacgccgtatcggagccacggtcgtgctcaatgcgcaaggtgcgctactatacgcggctgccaaagccaagcacttgacggcgttcgatcaatcggtcggccatgaacccgccgccaatgattccgacgaacaaatgcgcaaggccgccacagaactggcctacgctctcaaacgcaatggcaccggttccgtgacgttcagcgacatcaatggcgaacccctcaacgcgcgtcaccccttcgcccgcatcctccaccagtccggcttcacccccgttccccgaggcatgcggctgtactgattgagcccagctatcgaatgcggtagttggagccgcgttgggtcatgatgaggccggcgtgggtgagcttcttatccagtgtgtagagggcgttcctgaggagcccttgttgctcgaagaatgggccaccgacgagcttgaccaattcgctggtgttgacaaactggccatcagccttgaccagtgcttcaagcaaactgtattccagacgggacagtgaaattgcggtgtgtgtggatgcgtagtaggctttgcgattcgtggtatccaacgtgagattgccacgaatgatcatggtgggggagtcggtggcaagcgagccgacgtatgagagcagttcgccatcggagaatggtttgctcagtacggcatccgggtgtcgtacattagctcgtgcgctagcggcagcattgtccgtgcactgttcggcttcggcatctgagttgtttgcgtgtgaatccgcgctgaaggagctgtagggcgtctcttcgatcggggcgtactcgtcaggcagcgctcgccagcggctgccttcgccgatggttttgctgagtggcgtcgaagtcagcagcaggattttaacggaggcacgggcattgtgaagggattcgatgagttgctcggtggagatgccgagcagggattcatcgagaatcactgcgtcaaatagctccttggtgaccgcggcgagcgcgatactgccggtgcttgccaaggacacctcatgacgacaggcaagcagcgcaccacgaatggcgcgggccaacggttcattggatacggcaaccagtagtctcatcgccacctccttgatgcttagtgtaggtcgggtttagggtctcttctctatgtgtttggctcactatcgttcgctcctcgcctacaaacaccccactgagggtgtttgctttacggctcggcccatcagagggagcttaattgaggttacgcaatgaaggcgatgggggaggcgaggtccactccggagccgtctcggcgcatatcgggcttgggaagctcgaccggggagcctgcggatgtggaggcatgcaacgggtagagaccaacccaggcaagaatcagcgtgttctggcccttgaggaagcgctgggagcgtacgccaccggtagcgcggcccttggtggggtacatttccagcggggtgaccttggcggcgccgttttcggtgccgggtagtgcatcggagtcgccggccacggtgagcaccaccgcgccggagccggaagtcaaaccgttctcgccctcctcataggtccatgccaccttgccggcgggaaccacgttgaatgccgccacacgggcgccctcggccagcttgatgccggccataccgcccgcggtgcgaccctgcgggcgcacgttcttcgcctcaaaggtcagtagcgaggaatcggaggagatgaacaccagacggtcgtcatcctcggccacggcggcgaataccacttcgtcgccatctttcagatcaatgacgggccaggaatccatggtggtgggtgcctcacggttccaacgcttgatgacaccgttacgggtaccgatagccagcgacggcaacggcttggcctcggcggcaccattctcgctctcgtcctcggcactggccttgccggacgtcggctgctccatggcgatcgccgtaatcacgcgctcgccacgaatcggatcggtggattcggtcatgccgatcagttcgtcggcttggaccccacccttcagcgacaacgtggcagaagcaggtagcgccggcaaatcaaccacatgcgcgagcaccaggcggccggctgacgtgaccagcccgtacgtggcgcgcgtggaggtctcgaagattgtggtgatttgatcgtctcgcagacgttcatcggatgtggaccgtacattgaacacgtccatcgcgcttggcgtggtacgggcaatcaaaccggtggcgctcatcatcaccacgcacggctcgtcttcgatcttcaaggctccggtcagcgcggaccgctcgccggtcttcttggcggcggctgcggctgcggccacatcggcttcggcggaggaaatcgtggtggcggccttcactgcttcgagtgcggacttggacacacccgaagccccggcgccctgcgccacgaccggcgtcagcgtgccatccgggtcggcgtccagcagcacggtgcgacgcggcgagccccacttggcgaccgcctcgtccatctcgtcggtgaccacctggtcgagcgcttcggcggaggccagaatgcgggtcagctcctcgatgcgcttcttcaggtcatcgcgttcggcctcaagttcgatgcggttcatcttggtcagacggcgcagacgcaggtcgaggatgtactgggcctggacctcgtccaggtcgaacacaaccatcaaacggcttttcgcggcatccgcatcatctgaggtgcggattacctggatcacctcgtcgatgtccagcatggccagcagcaggccctcgaccaggtgcaggcgctccaacgccttcttcttgcgatattcgctgcgacggcggatcaccacacggcggtggtcaacccacacctgaagcatctccttcaggcccatcgtgtgcgggcggccctccaccagcgccacgttgttcatggcaaaattgtcctgcaacggcgtgtgcttgaacagctgcaccagcaccgcatgcgggtcgaaaccggtcttgatctcgatgacgatacgcgtgccgttatgacgatcggtcagatcgaacgcgccggaaatcccctccagcttgcggttcttcacgccgtcggaaatacgctcgatcaccttctccgggcccaccatgtacggcagctcggtgaccacgatggcctgcttgcgggccgtgacatgttcgatatgcgtggcggcgcgcgtggtgagcgtgccacggccgttggcataggcctcacggatgccgtcgcggccgatgatcgtgccgccggtgggccagtcggggccgggcacgtaacgcatcagttgttccagggtggcgtccgaatgcgccatgaggaacttggcggcgttcaccacctcgcccagattgtgggtggccaggttcgtggccatgcccacggcgatgcccgagccgccgttgaccagcagatttgggatggcggccggcagcacggtcggttccttgagcttgttgtcatagttcggcgtgaagtcgacggtgtcctcatcgatatccgcgttcatgccgagggccgccgggccaagcctggcctcggtgtaacgggaggccgcagggccgtcatccagcgagccgaagttgccgtggccgtctaccagcggcagacgcatcgcgaacggctgtgccaaacgcaccatggcctcgtagatcgcggaatcgccgtgcggatggagcttgcccatcacctcgcccaccacgcgggcggacttcatatacgggcggtcgggagtcaggttcatctcgcccatctggtagacgatacggcgctgcaccggcttcaagccatcgcgcgcatcgggcagtgcgcgtgcgtaaatcaccgaatacgcatactcgaggaaggatttgctcatctcctcgttcagcggcgtctcgacgatatgctccttgaccgtgcgcggatcgtaggtttgcgcggacggtttgcggtgtgatgccatgaaactccctttcgaacgcccccatattagcgggagggcgcgaaacagtgcgcagagaacggttctcgataacaactgtgcgctggtttcg

SEQ ID NO: 3056 - DNA, 2684 bp, Unknown
  R19_24m  MAG No. k141_25106
acgccacccagcaggccctcgccaacgcctaccaggcgatgatgaagaaggccggcatcaaggtcaaggtcgtgaacgtggccgagtccaagttctccgacaccgtgtcttccggcaactaccaggtgctgccgatggcttggcaggctccgagcgccatgaccttcgtggtgtccgccccgcagctgtacacctccgacggcccgtccaacttctcctacgtgggcagcaagaagatcgacgagctcgtcaagaaggctggcagcctctccgactatgacgagcagaccaaggctgtgaacgccgccgagaaggaagccctcaagctgtatggcaccatcccggtctccaacccggcttcgtacctcggtgcgaagaagggtctggccaactacggcccgtccggcttcgccggcaacctgccgcaggacatcggctggcagaagtgatgacgtctgactgacgtctgacatggccaccgcgccgggaacggccggccgcacgcatcgactgcatggctttcgatgccggacgcggcctgcgacaggttcccggcggggtgtgaccgcggcagcatatgccttactctccttatttctgcatatgatgctgcggttgggaagcctcccgtttgcgcgcttatgcgtcgcgcgcgaatgggaggcttttgcatacttgccgcgattccaccccggcaacgatttgtccaccttgctgcccgcgcggctgaaaccgtatccaccttcctcttcccggatttgtgacgctgacggttgccgagcgtcacaaatccgggagatagtcgcccttacttgttgtcagaacttggtgagcccggatttgcggatatggtcctcccagccatccggcttaggcagtgtgaccagttccctcattgtcacggcagggatcgcggccgccacgatgcacaagcccaaagccacggacgtgactgagtaaccccagtgttgcatggcgatgccggacagaaatgtgatcaccggggcagcaatcgtctcaatcatgcccatgccggcgaatacgcggcccatatgctccttgttgatgagcaatgattggaatccgttgattaccgcattgccggccggtagggccagcagcgaaattgccagaaacgccatacgcgcaagaatccacggagccagcgctgcgccgagcgcgccgatgctcatcagcacgtagaacgatacggcgactatgccgccgcgcacatgctgaaccagcacggaagagatgagcgagccaacgatgacgcccacagacacagaaacgttcatgaaactggctgacaccacatgtgatgggtcggagccgatcgagagcaccgtaatcagcaggaacgagttgaagcacgcgaacgccagcgcgctcgacaaaatcaggcgacgttcgaatcgctcgctaagaagccagcggaatccggaaaacatctcacgccaatactgtgacgcggatgatgtcgtggtcgttgcctgctcgtcagcggcctgagtgatgttggccgcatcgccattctcatcggcctcatcgtcggcaagggcgcggccctccgcattggtccgcccgccacgatgccagtattttgtgatccgcatcgccgccgcggtttccaatagattcagcagcgcgctgactgcgaatggcagccatagaccgccgccgatcaatacgccacctactggtgcgccggcgagttcgagggcggcatcgcggccatcattgaggcttgacgccttgggcagcaattgatcgggaacgatgcctcgtagcatcgtgttgctcgtggttcctaggaggcctgagcgtatgccgaggcatatcgcaagtaccatcagcaccgggtatatgagtaatcccgcccatcctagggccgcgcatatgccgaacagtgcgaaaccaatcaggccgaacgcaatcataagttttttgcggtcgtacttatcttgtaccacgccacctggcaaccgcaataccgacgatatcatggtcatgattgaatccagcagcgtcgcctgtgccggtgagcccgtgacggtctgcgcgatgagtggcattgcgaaaccttggatacttgatgacagcgacgtgcatgaatccgctacgaaccatttgccataatccgtgccgcgccatagcgactcggtggtgttgctatgtgaactgtgaccgttgggctgtgttgaagattggttgttgactgttccgatgtaatcagccattgtgatcatctccgtattcatcgatgcttgagatattctattatgcgcgtcttcaagcgccgcaccggactcacccccggccaataccgcgacgcctttacaacaccgtgtgattagggaaggtcagggtactaaccctgggaaaagtacagtattctgcattactaaccctaggaaaaatgtaatcttggacaatcgtaaccctaggaaaaatgtagaatacgcgaattgcaaccctaggaaaagtgtgtattgcggtataaatttatttttggccacatcgctcgtggcgctcgggcggcgcaatatgaatccgcgattcagcagattgtcgattctggtcttgcgttgcgggtgtatcgcgtcgaaaaacctgcggcaccattgccgtcataccgtgatgattccgcgttcaaactgtatctccatgatgttgggctgctg

SEQ ID NO: 3057 - DNA, 33001 bp, Unknown
  R19_24m  MAG No. k141_25671
cgctcatcgccgaattcggcgatccaacgcttcaagccggggtagcaacgcggatttacggcgacgtttgcgccgaattccggattctcgtaggcgatttttgccaacagaatcgggtccgcgttcggatcctgtacggcagcgaccgcagcatcataatcaaccatgggattacctccttatgttcgctcggttatgccgaacgtatggtccgtagtgtttgtagtgttgcgtcttcaatggcgccaatgtcctcgccctcgtccagtttaaaagcgctgaacgcgtgatgttcgggttcggtcagtggcatatcggccacaatcacagtgatattgtcggttccgcccgcatcgagcgcggccgccaccaaggcgtccacggcttcctgcggactggaatgcgctgcggcgatggccgcaatctgttcgtctgacacttcaccgtgcaatccatccgaacagatgatgaaacggccggtcagatcggcaacatatacgtcgggcactatgccgtccggatcgcccaggcattgggtgatgatgttgcgtggaatggtcgcctccgcctcttccggcagcatctgaccggaatcgatagcctcctggcgttgggaatgatcccgcgtgatgcgggtcagcgaggaggcgtcccacacggggatgatatccgtggcgggggcatcggcatccggcagcgggctgagatggtaggttcgggaatcgccgacattgaccacataggtctggtccgagaaatccggggagtcggcgtcgtcaaacggagctgcgctgtgggcattgatggcatctgcgtaaggctggggcaaaaccaggccggagcaggtcgtaccggccacgccgccgagacggtcacccaaatcgagaatgtcgtgctgagcctgtgccagggtgtcgtcgatgtcatggcgggtgcgcgagggcatggaagccagctgcgcgaaatgctgggcagccaactggcttgcctgctcgccgcctttgccgccgcccatgccgtcgcagaccatgaacacgccctgttgggcgaatccggtgtcttggttgttcttgcgcctaagacccacgtcactggtcatcgcgatacggatggagcctgtggtcatgacgtcttccccttcttacgcgcgcgcttgacatgcgtcgtgtgcgacttggctgcgtgtctatttgacagtatagccacgcttttcagggaaagtcgtgtacgtatcctcctgaaacgcggcaaagaagtgagcattgccttgcgcaattggtcgactcctgtccaatatgtggtggcttggcccgattcaatgtcttgccccgagaacgtgacgtagtcggcttcccggccaagctggatcaaagcctggtcatctgtgccgagttgacgggcgatggcaccggcctgatctcgacgagtgcccttggctgtgatgccgctttgctcggcaagcatgcgtatggcattccaacctgctgccacacgggctttcggactgccatgccgccgcgctcgcgccagcagcatggccttgaacatcagaatcagaccgcagacgatgagtagggtccacaatgggctgccgtacagggccaccttgcgggtcactcgccagaaccgcacccagaacaggttggtcggcgaatcatcggcgtcggcgccggccaatgagctttggcccctggcttgcgtctgatcgcgcagcggatcggtcaacggcaccggtggttgccggaccagcgtctgcggattcggcggcgtcaggttctggttttcatcaggcaccttggtctccttgggcgtcggatagaacgccacccatcccaggccctgcaatttgatttccacccaagcggtgacatcgttgccggtgaattcgattttggtgccattgcccgaggtcttctccgtgcgggcatcggtgatttcgccatcctcgtttttcggcaggaagcccaggaccacacgggagggcagtcccagctcacgagccatcagtgccatggcggaggcatattgctcggagtcgcccaccatggccgtgcctgccagcagcttgttgatacggtagttgccatggccggcatcggagggataatcgccttcgagtccatgagagaaccatccggagtctttcaatgtgtcggccaacgccgtggctgcggcaccgcccgaggactgtccgccggcaatggacgtggccagtttgctggccgaatcgggaacatcctgggcttccggttgggtgatgcgggccgcggccgcactgctgatctgcttatcggtgggcttgcgggcgataatgccggattcggtataggtgaggcttttacgcgtgccggcgggaataatggcggaatcggtatccgtgttgtagtagaacgtgtcattgccgttgtcggcatcgttggcgaagctcacgccagtggccgctcccgccagcggcagccaggtgtcggtcaatccctgatcgacggtgaaggtcgcagtgaaggattcgccctgctcatccgccttgatcgtggtgcccacgcgatgataattcgaggagtccgtggcttcggaagaatcggacaggttccatactgtgccgtcgaatcgatccatcaccgcaagtttgactggtgttccggccggcagattatggacggtcagcaacacgtcttttttgtggtccttgatataggatcgcatgccgctgagcgggctggtgtaatcgtaggggcttaacggcggatcgtagcggtcacgcagcacgaaacggtcctgcggcaccagcaacgtgcctccgaaagcaaggccggcagcgagcacgacgatgatcagcgcggatatccagcgcccccattccagcagttcaagacgccaagacagccagataatcagcagcaaggcaaaggcaatgccgcagatggcacgttgccagccgctgtccgtacccagcagagcacatacggccacggccgccgcaaggggcggcactcccaccagagacaaccatgcgttggcattaatggcaaacacgccggtgaggaacgtaagccacaggccgatggtccataccgccagcagcacgccgtcttgcgtgcccagaggcggatcgacggaaataatgtacttgaacgagccaaacgtcatttcccaacctgaactcaaggtcttcaaggtgggaatcacgtaatgggacgtggtggaactcagcgttaccaccggaccgatgatgaattgggcaaacgccagaaacacgatttgccaccacagtcgcaacgccggcaacatgcccgccagagcgatgatcgcgcccagcaaggtggccggtacggcggcgatcgcccaagtggccacgccgccgtacacgtcgatgagattggcttgcgccagcaacatcatcgccgctatgagtacgaggctggtgattcgtttgccccacggctggcgactgaggcccatgccgcgaagcacattgcctctggtcatccagataaccgaatgtgtggagtcggcccaggagccggtggtggtggaggttccggtgtacgtgccggaggaagtgccggtgtatgtgccgctcgatccggcgtacgcagcggtattggtattggtgatactggactggtcgaaggtcatgcgagcacccccatgatcagtgggagatcatcgagttcgccgatggtggccaatgtgaagttggcgaatcttctgatgccgcgattggcgccggcgctggcctgcaataccacgcagctggccgatcggggcaaggccaaggtcatgcgcttgatttgctcgatgtctttcagcgatccaacagtgaaaaaatagaacgaagcatcaggactgtgcttcagcgtgccctcggcgagattcggattgtcctcacgatcaggctctatggcactggcgttgtcgaggaactccatggcgttgcgcggctggccgtgcgcgttgcccgcgtgacagaacagcgggcgatcctgcagcaggcatttgacgccgatggaggagtggatggacaccgccatctcgaattcctcgccgttgacgtactcatccgggttcacgctgatggtcaccgaggtgtcggtgcggcgcgtggcttcatattggcgaatcatcaacgtgccggttttcgcggagctcagccagtggacgttacgcacgtcgtcgcccggctcgtattcgcgcaatccgtagaagtcgagatcatcatccacgatctggccggatggttggccttccagatcgcggggcacgccggcattcagggtatcgagacgcacggtacgagggtggatgaatacgatgatgcggtcggccagctccttttcgtgacgcaccaggccgaacgggtctcccttgcggatgcgcaatggtccgatgggcagtattgcgcgcgataccgtacggaactccacatcggtttgcttggattgcccgggagccagcatggggatgttgaatcgttcatgcgcatcgccgattggcagatatccgcgtgccgtggttgtcggcgttctgccggtgttgtcgatgccgacgataacggatatggtgtctcccacggtcacgcgatgatcggatacggcgatggacgcgtggaagcgtgtgttgccgagggaaagcgcgattgccgcgagcatcatcaccatcgccacgatgccgaatacgagcagctcataccagcccagaggcaggaacgcaataagacatgcgatgcctgcgcccgttaccgcccagcccaagggcgagacgtaggatgcgaagaaccgtctgatgcgtcttaccgcgcgcttgaacatgcgttcagcgcgccggcgacggcgtaatgcggcggatgtagatgccatggtcggatacctttccaggccctatcaggaaccgatggtgggggagggaacgtcttcgagcacctgtgcgatcaggctttccggagtcgcgccatcgaaggtggcttccggagtcagcgtgatacggtgtgcgagcacggccactgcaaggtccttgacgtcatccggcaccacgtaggcacggccatcggccgcggcccagatacgggcgcatcgggtcagcgccaaagcgccacgcatggaggagccgactgtgatcttctcgttgtggcgggtcgcctcgacgagcctgacgatgtattcacgaatcgcatcatccacatagatttcggtggccacctgacgcagccgcatgacatcgtcaccgctcagcaccggggaaatggtctgcgcacggtcggtgatatcgacctgcttgaggatatcgacggacacatcatggcccgggtagccaatcgacgtcttgataaggaagcggtccatctgcgcctcaggcagcttataggtaccgagctgctcgatggggttctgggttgcgatcacgatgaacggctgcggtacatcatgggtgacgccgtcaacggtgactttctgctcttccataacctccagaagtgcggactgcgtcttcggcgatgcacggttgatttcatcggccagcacgatggaggcgaaaatcgggccctcgcggaactcgaattctccgcgcttctgatcgtagaaagtcacacccaccacatccgaaggcagcagatcaggcgtgaactgaatacgcttgaaaccggtggaaatggagttggccaagcctcgggccaactgggtcttaccggtgccggggttgtcttcaagcagaatatggccaccgaccatcagtgcggtgacgcattgcttgatgggaatggtcttgccgataaccaccttggagacattctcgaccagcgcattgaaggactgctggaaatcccggacctgagccgtgggctggggcagtagtccggaattgatgctggcgggcagtgccgatgcggctgcttgcgcggctttgctcgactgacgctgcggctgggattgcggctgggattgcgcggcggcctgctgattggctaccggcccgcgaccagccacggtttcggtgttggatgctgcggtcttgccggcggttgtggtcgtccattgacgggaggtctgggtggcgggggcagcattcgcagtagcggcctgcttgccggatttacgtccgaagtgcggaagcgcgactttgggcgtgctggtctttgccggcatgccgacctgctgcgggatggctggcgtcgcgtccttgcgcggcttgagcacggtgctgtcatcgcccgcaggaatggaggcggcatcagtagtaggagacggcttttctgacgacgcttgtgacggccgctgcggcaggttaggcaacgcaacgggttgctgtgccgtctcggtgttcggggtggtgccagtgtgcggttccgatgccagatgtgtggcatcggacaagtgcgtggcgtcggatagctgcgtgctgtcagacagctgcgtcgcgtcgtcgatgttctcgctcatggatgttctcctactgcttgtgaatggtggttgacgatattggggtattaccgaaaccaagaatccaagggttcttggccaaagtggtgacatcggtaccggatttgagcgactcggtcccctccgaggaatcagaggggcgtgtgcccgcgacgctgctgccgtccgccgtattgtcgagaccggagtatcccggcccgccggtgactttgacgctccacgtgtagttgccatcggcggccacggccaagtcggtgacgtccaatggctggccggggttccacgtgaacggttggccattgatgatgatttgtacggtggcctgcttgccatagacctcaaccgaaccgccggtgacgttaatgacgtgagcgttgtctgaccagcgcagctcctgcggtttgttgattacagccttcttctcataggtgtaaggagcgccattgtacgggcctccggtggcggcatcgctggtagcgccgttgaacacctgttgcaccgatgcggtattgcatttggcccaaggactcattcggaagtcgagtgagttccggttagtagctgtaccggaatcgatgccatcggcagtcacgttgtaggactgcgcatgcccctgcttggtccaatgcacggtgcatgtactgccggatccggtggtgtagacgtcagtgggcggctggacattgtactgcgggacaaacctgctcttgcctgtgccggcggaagcatcgcgctgcggcaccacggtggccgttacggtgatttcccgggtgttcaaatcgttctcattgatatcgaacgtagcgccaccgtcactgcaatcgatggtgtccttgacgtctcctcccaaggaaattcgccggcagccggcattgcggttgttgccgagagtgactttcgccgttcctgtggtgtcgtcgttcgacagcgcaatggtcggcgcatccgggtctccccagatgtcctttggctgtgatgaggcggactcggcactccaattgattttgttatgggctttgacggtcgccgtaatggcggtgccatcggaaatgtcgttgttgttgaacgtaaacgacagctcggtggccgtattgccggtttccttggtctgcggagcacctgcaccggtgacggtcaccgaatagttgtcgacggcgctgaaatcaccgctcggcgctttccacgtcactttggcggttttattgccacctgtgaccgtaacatcggtgggagcggacggcaccttgtccggtgtggcttcgacggcggtggacggtttggaccaaccgacgtcatttcgcgcggcgacggtgaaggaataggttttgccgttcttcagacccgtgacctggcatgaggtgacggcaccgcaatccttctctccggtggcggcgccggtccaactgaccttgtagttggtgatcgggctgccattggcggcaccgggcgtccatgtgaggctgaccgcgctgtcctgcggttccccggctacgggggagagcagtggcggctcgggcttgtcgatcacggacacggtaatcgatgcggtgacttcacgatccttggacttgctgccgtcttgcacggtgacgagcacggtgttcgtggaagcacccggatcggatgcgacggcgatggtgacgtttccggaggcatcgcatccggcgatagtgagtttggcggcgtcatccgccttgcagctgatgacggtcagcgaggaatcggggaacggattgtacgcgccggtaagcacgttcacggcatcgctggcaccggccttgatcttcagcgtcttgtcgccgacgcgtgccagcggacgggtggaagacactacgcgcacggtcacaccggcattcacggtgcccgcgccgtatgcgatttgcacgggaatggacgcggtggtgccaggagcggcatccttggtggcggaaacctgcaagctgccggaacgggacaggttagcggtgattcgcccggacgatgagcttccgccggaatacgtgtattgcttctcgtcgtcatacacgccggacggtgcatgggtgagcgccgtcagatcaacggtcttggggttcgcgcccgcctcgacatcaatagtggaggacgagaacgtgggcggcggcacatcgcggcctatcaccgtgatctggagagtgatcactgcggaattgatgatcttggtcttatccgatccctgcttgccgtccacagcggtaaaggtaatggaggcggggcctgcgtagtcttttgccgcagtgaacttcagggtcttgtcgttcacgtagaaatcggagttggaagccttggtggcgctgacggaatcagcgctttcgatatacggttccttgccggcaccgacgcgaacatagtcattgatgttgatttcaatggtctcacgcgaattgaccttcaattccggtgccttgggacgcaacgtgggcggaaagacaccataggccggtacctggatgaacgcggtggaggtgatgttgtatttcgtattggtcaccgtgtaaggcacggctcgcgcctgtgacgtcaggtcgacggtgatggtggtcgaatgctcaccgcccttgacgtgagcgtgagcgctggcggagggatgcacgccgaccttgagctcattggctgtgccggaaggattggcgatccactgggaaacatccacatccacggacttcttatcgatggtggcggcggacggcacacgatagtcgtaggcggtaggcggctcgatggcggcattcggatccacgtttaccgtgagggtggccgtatcggacaagccggccttgtctttgaccgtgtaggcgatataggcggtggtggcgctgccgggcgtggtgaaggagatcatgttgtctttcgcgctcaccccgtcgagaccttggacctcgacatgcttgtcgacggtcagattggtgttgtcgccggagatgtcgttctgcgcgaccggcacggttgcggccgtattgggcctcaacgtgatttcgtcatccctggcgtatacgccggagtcggacgatccttggaatacgcccacgcggatctgcgcctgtgcgcgctgaccggtccaatcctccacggcataggagaaggtgtcggtgccggacgaatccggatacgcttcatagaccaagtagtcggaaccgacttcggatatgcggcccagcgtgggtgccttgttgcccagacccaacagctgatcgtcgtcgccatccgtgtctatgccggtcagtgtgatggggatgcggaccttctgtccggcggcaacctgcgcttcggcgtcatgcggggttggcgcggccttgctcgctgcgtcgctcttatgcacggtaatggtgatattggcggaagccacattacccagattgtcttcaaccgtataggtgatggggaagttgccggtctcgctggatgcttggtagcggaccgtgtctccagagacgaaggccagacccttgaacgtctccttgtcgtattgcaggttgttcttgagcttgaccgtggtgccatccgagtaggccacatggtcaagcacatccacggacacgatgccgccggtgcgcacctgggcattgatattgctggccttgggcactgaattcgaggtggtcagagccggtggctgcaacacgatggtgcccttggcggttccggaggcgttggccacggtgtaggtaagggcgacgggtttcgtgggcacctgacgcgcagtgatatacacgcgcttatggctgacgagaccaaccttgatgccggagtcggccggtgcgctcaccgtggtgacggacagcacgccgcccatcggatcgacgtcattggtgagcggctccacaatggcggtattatccgcgccaagcagggcgacatcgttggcggcaaccggtttggcggcctcgccggtggcgggctgtacctcgacgcgagccaatccggtggccggaatcgagccttgagtaatggtgtagggcacataataggtgccgggattggtggccttgaacgtcaacgacatatccgccgcattggtggtcgtcgaagcgccgttgggcgtatccacctgagtcagctgtgccggctgcaaggaagtgccatgcacgtaagaggacagcttgacgacggtatccgtgttgggaacggtggttttcgctaccgggtcgatgaccgcggccaaggtgttcgcgggcttgaccgagaaatacaccatgccggtgccggtcgccgtgccatcggagacggtgacctcgacgcccacgcgtcccgacgccagcgcaccggtgttgaacgtaagctggccgtcggctcgggtggacacctgcacctggtcggtgttctgggccacagcggagaccagagtgagcgggtctccatccggatcgttgaagctgctcagcgcattggcggtataactggctccctgctccacatcgatctcgggaggagtgtcgaactgtacgggagcgtggttgcctccatcattcagggttacggtcaccgtggcggaagaggtctggccgcggccatcggaaatatcgtaagtaaaggtaacggtgcctgcggatgtggcggaggcatcgagttgcagataccggccgtcgtaaatcggcgaaatggtgacgtctttgttgtttggtgcgccaaccttggtgattttcagcacggaacaatcggtctgctcgtcattgcgcagcacgtcgagaatctgttccgaaccggctcgtgcgccgatttcatcatcctcggctttgatttggccggattgtgcggaacaggtcttggagaagtcgtggtggttgttggccgagtcgttgttctgctgttctttctcggtctgctcggcctgtattttgttccactgtattttgatgactttggtggaatcctcagggttccacacattgccgttaaccgtgtcgttgagcactacaaggcgatggttggtgcggaacaccaattcggaagtagtattgacggattcgagggtttgcggcttgacgctggtatccgcgggggagcaggcgcgaatgtagttgctggccttctggctccaagccgagtacacgcagcccttggacgataccggtcgtgccggattcgccttgcccccgttggctatgaaattcgccttggcattggacttcaacgggataagcgcaaggcctctcggtgatgccgcggccacccaatcggactgtacgtcatcggtgggaggctcctgaagggtgagggtgccggtcgtgtcgacatcgacgcggccgcccttgaatatgacggttttgccggttgcgattaccggcgtgctcccgatgacggtaaagctttcaacggtctgctgcttgccgtcggtcagcgattcgagggttttggccttggcgctgctgggattgtcaagacgcagcaccataccgtcggatggacggtatccgtagaccttgccatcgtgggttactgcgatgcgcccgccctcgcccagcttcattttcggatcggaagtggtgggggccacggaatcaaggttttccgacaagccggtccacacattgccggtcttctcgttgatcagggctacggtatccccgccgaccacagtggtggtgttggctttgatgtcggtcttgacaccggtgctgaccgtggatgccttgatggtggaggctttggtcgtttcggtcaggatggtgtcgccattatgctgcgcgatgtcgaatcgtggggcggaggaggagacgccggcgtcggcctccttgttctttacgttgaatcgtgcggccttctggttcttcagcgaagtgacccatacggtaccatcgtccagttgcacatggcggcgcgtgacggtgctcatgatcaccgcgccggcaacaagtcccagaagcagcaggagcgtgattacgggaaccgtccacgtatgccctccggagggcataaggcggcgcaaagccgcgctgatgcgtcggcgacgatcgtatgactgggacgatgtggccatctgaactccctgaaccctggtttctctggttgctagtgtaatgacaacgctttacggttccaatacctgccgttcctgttgtccatttggtgaattcgccactgccgggcgcatgcctgatgcgatacgcaatgccaaggtggtatgcccggcagtggcgagcggatcactcttgcggcttggccgcacaggcgatggcggggctgacggacatctggcggttcttgcgcacaatggacacctgaatgcaggtctgcgagccttcctgcgcgttgacggtcaccgtgggatctgacgttgtgacggtttgcgcgctctggtcggtattgctgccctgcactatggcccacgcataggtatcaccgctttgcgggtctggattcgtccaggtgaacgtcacggatgacccatccgccgcataggtgccgttcagattctccggggaaggaatctgggcgttcgcggtatcggtaatcacgtcatcctgattattgcggttgttgtcatcatccttggtgccgggcgtcgccacctgtttggtatctgatccggtggcgctgtccatgcggggaacgaccacgaaggcgaatatcagtgccgctgcggtgatcgccgcaagtataccgacggtaatacccaccggtttgacccatcgccgtgacgaacgggtggtctgatctcgctggtccgtggcccggcgccgacgctcgatgtctttggggtaggccggcatcccttccacggtaacgggagtggcatgcccgaaatatgcgaattgcacacgctgcatggcacgtgcgaactccaacgcggagtagtaccgctggtcggggtccttgttcagggcccggcgcagcaccgcttccacatcggccggtacgtcggggcggttgaggcgaggcaatggctggttgacgatcagcgaaatcagttccgattgcgaacgtggatgatattcgtgctggaatggcgagcagccgacgaacatggcgtacagggtggccgccagtgaatagatgtcggcggcttccgaaccattggtcagatgctgaagcacttcaggcggtgcccacggcggcgagaatccggtttcggtacggtcatacacatcggtggagataccgaaatcacccagaacaggcaagccctgcgaggtgatgagaatgttgctgggcttgatgtcgtgatggatgatattgctgcgatgcgcggtgaacagcgcgcttgacagcttgatgccgaggtcgagtacctgctcgcaggtcatggaccgggccttcatgatgctgttgtaggtgccgcccggcgcatattcgatgacaatgtagccatggccatcggaggtgacgccggcaccatataccggcagaatgtacgggtgggatgacagcttggccatgaagttggcctcgcggttgaacagggcagcggcccgtgggtcaagggttttggcgctgacctttaccgccaccgggcgtgcgggcatacgctggttatataggtacaccgtggcggtggcaccgcttcccaacatctggacgaaatcatatccgggcagcttcggcggcctcatcggaatattggccatctgttccctccctccttggaaaatgcgctctccctgcattcgttctacaggataccgtcaagggtacgattcttcgtcgggttcggtaaaatttttccctctgtgacggtcgggtttaggctggagccatgatgacgagacttgaacctggaacagtgctggacggcatcgaccgtgatggagcggcgaggctgattgtcggcacgcctggaagcggcaaaaccgaattcgccttatcggtgttgatggcggggctgcgccgctacggtggcacgcaggcggtgatggccgtatccggccgtgtggccgccgacgcattgggcaatcgggtgattcgtgagctcgggttttccgtgcaggccaggccggtcaccacgctgggtgccgtggcattccgggccatatcagcttcgcgcgagggaactggattgccgtcgcctcgattgttgaacggtgcggaacaggatgctttgctgcgtcaagtcatggccgtgcatctgcgccatgccgtagcgggagatgattgcggcacctgtgatttgctacgcgtctactttgcccaggatgactgggcgaaactcatacgcgatgccggtgccggcgagatgcccggctcggccgcttccgcacaatcaagcctctcgcaacaagggtcggattcgccgtctccgacgtcggcaggcggctcgaccagcgcggataggttcactcgaggtatttcagatgcgtttatcagccagttgcgcgatatgctggcccgattggatgagctcggtgtaggcgttcacgaagagccacgtctcttggacgccgtgacggaggacgcgcgattgtcggtgcaatggcgtttggctttcgcattgcgccgtgaatatattgcagcccaaagcgcggcatatccggggcaataccgtttggatgcctcgtatttgctggtggcaggagctcgtgtggtgcatgaggcattcgccgccgatcacgcggatgattccgaccggcctatgcgtatggaggcgttgggcttgccccggctgctggttgtggatgatgttcaagacaccacgctggccggcatgcgcttcttggaggagttggggaatgccggcgtcaagttggtgctggtcggcaacccggatgaatcggtgcagaccttccgtggatcgtatccggaatatctgatgcgccgtgccgtggaagggtggctgaaagccaaggaagaacagctggttggcggcagtaccggcgctgatcagtcgcacatgacgatggctgatgtgatcgcgtctcgtatttcgctgtcgattccctcgccggaagacgagccgctgcctccagccgagcgtcccggcaagctgaccgccatactgggcggagtcgatgcagcgaattatcagtcggacggcacggtgaccgccggcctgtaccgatcctcacgtgaggagctggatgatgtggtctggcgcatcaagcggacgcatcttgaccggcatattcggtggaacgacatggcggtcatcacccacgacaatgccgccgtgcggctgttcggcgaacgactgcgccgagatggcgtgccggtgcggtattcgtcggtcacccgtcctttgaaggacgagactttcgtgcagggattgttcgcgcttgtggagcttgcccgattgcgtgccgagggaatggcggaatgccagatgacgttggcttcctgcgcggcatatataaggactagagtggccacgttgatgaacggcccgttggtgagtgccgggggcagacccggtcaagggcgtcctgcaaggctcgctccgattgaattggccatgagcgcgctggagtcgctggcgcatctcgccacggatgatgccatgctgacctctctgacgacggcatgggagacattgcgtgaaacataccatgaaacacggcgtgaaacaggtcgtgaaacatcctcatcagtggttccgtcgccagtgtctgtcgaaatactcggtgaaccgtccgacgatgacttggcctttggcgttgacgcgctgtacgtgatgcttgccgttgatgatgccgccgcgccggcgcaggctgcgctcgcatccatccatgcggtgcttggcaacgaccctcaggcccgcgcttttgcgaacctgtggcatctggtgggcagcgttgcttccggcttggagcggctgccggcaagccagcgcgtacagccgcgttatgcactgtctgttgcctggaacgccaccggtctggcaccggtctggcagcgtgcggcattattcaacacggcagaggggcgcacggccaatgaccggctggacgcggcaatgcgcctgttccagttcgccgatgattccaccgccagccgagacatcacgtcattcatgacacaggttcggggcatggaagtgcaggccgattccttggcccacatagggccggtggaagacgctgtgacattgaccacgccggcaggcgcggccggacgccactggggatatgcgtggataccggtggtccagcaagacgtgtggccgaacctcgccgggcgcaacaccatgttcggtggtgaagaccttgccgagctcgtgctgaggggagcgcttgaagaaagtgacaaaaccgggcatgatccgcggttcgcggctgtgctgtcgggcgagaagaagggtttcctggtcgcgctgacccgtgcacggcgaatcatgatcagcgcggtatggaacgacagcatgagcccctcggactttcttttcgggtatctgccggaatactatccgcgcaaccggcaacaggcgcctttcaccacagtgggggcgcatacaggatccgccgaatatgatctggccggattggacgccgacccacgtgggttggtcagcgccgcccgcgcggttctggccactgctcaaccgcagcaggctgccgcaaaggacgccgcggttgcgttgacactcctgtcggagcatggtgtgcgcgccgcaaatccgcagagctgggcgttcgtggaatcgccggcccaatcggatagcgcgtcatctgacagtgcctcatccgacagtgcctcatccgacagtgcctcatccgacagcgcgtcatctggcggtgtacagtctgacggtatccaaacggggaaaggcaagacggatgcgcaggccgcacccatggtcaccctgtctccatcggcggtcgacagcctatgggcatgtccggtgtgctggatgctggagaaccggttcgccggtcctcgccccagctccgtggccaccagcttcggaaccctcatccatgcggttgcacagcaaggcagcgaggaagggctggaccatctttcccacaatgcccagacgttggccatactgggcttggactccacggccggcacggaacgccgcatcgaggctgtcacggcacggcttaatgccatctatcagagcaaacgccccgatccgaatgccatagccgacacccggaaccgctatgaggccacccgtaaggacgagtccgcggcagatgccctgcgcaacatcgccgattactttgtgcgcagcgacgccgatccggaaacgtatcttggcaagaactccagcaacttcagcattggcgcattggccggtgccgaatgcgaacgggagtttgccgcacgattcgatgtgcgtgacatactcgacgcatacaatgccgtgcccggcatgcacccgatcgatcggaacatgctggtctgtctgatgggagcactggtcggagggtggccggaaggcatggacgagcatctgaccgtgagactgtccgggcgcatcgaccgtatggaaacccgcgtactcgcagacggcggcgaatgcattcgcctcattgactacaaaacaggcagaacgcccacggtcaaacagattttcaatgatctgcagctcgtgtgctatcagcttggcctcgtgttccccgaagacgggccgcgcggtgccaaggcacttgccgcaatgccgcatatcagccaaagcgcgctgttccatgtcgggcagaatgcggcaccagccagaagctacgccccggaaggtgccttccagccgccgctgttcactgatggttcgttgaatgccgaaccgttcacgccacgatactggtataaagaccccaaccgtttcttcgacatacccgccatagatccggctactcctcccgaaggtgtgagtgccgaagcgtgggcgcaattcgccgcgctcgccggtacgcagacgttatggtcgctgaccatgatcgcccgcgtattctatgccgcggcggccagcaggtcggccatcatcgaggcccatccgcaagacacccatatcggattctgccgtatgaagaacgtctgccctgcctgtgcgggccagatcgacacgattttcgaaacgaggcaagcatgagcacgttcactcccagtgcggaacaggccgccatcatcgatgcgccagtcgatgctgacgtactggtggttgccggtgccggttccggcaaaacctttacgatgacccaacgcatcatcgcgcttatcaatcgaggtgtggcacctgaacgcatccttggcctgaccttcacacgcaaggccgcaggcgaactgctggaacgcgtctccgccgcagtggccggtgatatggcgggctctacgaccgccacggtgtctgatcgggcattcctcaagccggccattttcacgtatgacgccttcttccagaccatcgtgcgccaatatggactgcttgtcggattcgatcagaacacgcaaccattgagcgcagccggagcgcttcaactggccaccgaagtcatcgacagtcacatggatctggcgttcagtgaggattttggcgccttctccagtttggcgaaccgtgttctggcgttgtcggatgccattggcagtgccatgatcggtgccggctgcaccagcttcgatgatgcgatcaatcaagtacggcaatgggattcggcattcatcaatcgattgcagcaagccgtcgcagacgaacccatgcccgaggacgagccgaaaatccccaagatcaaacgactgaagaaagataccgacgccagctggcaagccaagctcgatgaccgtgccgaacatttgcacgcccgctgcgcctatcattgcggtgcgctgctggagaccacacgcaaacgcgatattctgctccagctggtggaggcctatgcccaagccaagcgggaacgcaatatggccgaattctccgacttcaccattgccgcgtatcagcttatcgagcgcttcccctccatcggagagcgcacgcgccgcaggtacagccatgtgctgctcgacgaatatcaggacacctccaccacgcaggccgctctgctggcagcactgttccatgtggatgcgtcacggaggtccgccgtcaacgcggtgggtgatccgttccagtcgatttacgcatggcgtggtgccagccctggtgcattccgtatgttccagcaagatttccacctgcctgccggatacaagccattcccgttgtccgtcaccaggcgcaacagccgtatagtgctcgaagccgccaataatctcacgctgccgttgcgctccaatccgtcgcgtccctccagctcattgatgcgtgaggtcgatgtctcatcgctcgaccccatgcctgatgcccccgaaggaacaatgggagtactgggcttcgccacggccgggcaggagatcgacgccgtagtgcgtttctgcaagacggccatcgcacggcaccgttccgcagccgaacaacaggaacagatgccgggcgaacagaaagcgccggtcgccgtgctgtttcggtccaaatcacatatgcccgaatatcaggcggcattggaacaggccggattgaccacattcgtggtcggctattccgcgctgctggaacgtccggaaatccgcgatctgatggcgttgctgcacgtggccgccgaccacaccgatacgggatcgctgatgcgcttgctggccacgccacgattcaccatgtccgcagcggatttgaccatgttggcccgttttgctgaagaacagaacatggaacaacgcttccaagcattggtgcaggccggccttgcccaaccggatacaccagcgaatgaatgggcggctgtggtgcgtgagtaccgcgatcaggtggccaatgcggtattcctgccagacgtattgctacgcggcgacctggtaaaactgcttgaacggttgagcgcacacgggcgcaacgccataacccgggccgcggtgatgctccgtcaggtgcatgatgccgtcgggcggccactgggcgacgtgattcgcgccggcatagaagcgttggatcttgacatcgacaccgtattggccggtgtgctgcataatccgcagcaccgcgccaatcccgctttggcgcatatgcctatggatgcgattgtggatttggtggatacgtacacgcaagagattgccgctgagcaaactccctcgttgcatgggttcatcacatgggtggatcatctggcttcggtggaggatgaagccgccagtctccccgacgctccggtggatgtggaactgatgaccgtacaccagtccaaagggttggaatgggatgccgttgcggtagtggggcttaccgccggcggattccccagcaatcagggcgaccatctcaagatcgtgctggacgaacaccatacgggaggcaccgagcaaggtcactggaccgcacccgaatatcacgagaccgccgactcctggctcaccaaccccaccgccgtgcccgtgcctatgcgcgccgatgccggcattttgccgcgattcccccatgatgccgatgtggaagccgaccccatcgcatcgttggcggctttggatgatgtggagcttatcgatgatgaagtgttcggctccatgcgcgaattcggcgatggcgtggaagaagtggatgcatccggctggtatttgacgcaggcggaggaatatgggcgtcggctgcatgccgacgaacgtcgattgatgtatgtggcgcttacccgtgcgcgggaagatgccctgatgacctattgcgcctatacgggcgaatccgggcgggacccgtcagtggtgcccaaaggctctcgcgccgctcagccatccaatttctggcttgaagtgcatgacgcgctccaagcccgtgaacatgcgatatcggctcaggactgtgtggaacggttgcaagccgccaatgccgggaagcccatgctgatctcggcgcaaggcgaagcgattgcccctcccgaagggttctttatcggagagcatgccgcggcatacagtgacgccgtggtgggggaggcgtggcaaacgccgattacgcagacgaatgccgccgccgaattgccgtggccggctaccctcagcgacgcggtgcatgaacagctgtcacgcggcatcgatgtcatcgccgcagattcctcgtcacttgagcagcaccaagacgccggcccactcctgcaacgggcacaattgctggtggacgacgccgatttgatggccgatgccgccagcggccagtcgcttgatgaggcagtcaaagccaaggcgcaacgcgttctggccgcaggacgccagaacgtgacaagcctgcaagcccgcgtaggtggcatgaacgaacgggaggagcgcctctactggcgtagcattatccgcccgattccgcgcatatcgtctccggcggccgaggccggcacgcagttccatgcgtgggccgagcaattcatcaatgccggtaagccggatgaagcggtactggcatatgaagccgaaccaagcatgccgcatacaggtcaggatgcgggattcgtttcccgggaagccatgttggccgatttggccgaacgggagcggcaatgccgcaagccatccacacggcagcccgctgtcccacagcccacggctcaacaatccgtatccgccgtatccgccgtatccgccacttccataagcagcgacaatgccaccgagtccaagctggtggcgtggcagcgcagactggccgaatcatcgtgggccaagcgcatcccggcgtggacggagcgtgccatcgtcgtggacgtgccgggcgtgggcctggtcaatggcaaactcgatgcggtattcatcggtggacttgacccgtccagcaccaccgcacgctttaccgtggtcgactggaaaaccggtcgtcggcccaccaagccagacgacatcacccgcaaactcgcccagctcgacatgtaccgactgctgctggcagcggtcgaaggtgtggaattggacagtatcgacgccactctctactatgtcagtgagcccgacgagggcttgcgcgagcttcacgcccgcgcgaaaaccaaacaggaaatccttaccgagttgagctccggcattcccgaacaatctgacaacgactgagcccaaaggctcatgacctgtacagcatcggacggccttcaccggtggagagaccttatgcatcgcaaggcatctccgacgatgaagacgactggccacgtaccggtccgcggttgaaacgcaccgcgtgacgttgctcgggaaccgctaccctcggatggcacgtgtgggcgggcgcacgtgccggacaacgcaccagtaaggagttattgtgtccacgactcgcgcggtttcgaagtcgtccgctgcccactcgccctaccagcgcctgttcatgctgcccggagccaaggcgttctgcctgtccggcgcggtggcacgattgccgatctccatgatgagtctcggcatcgttctggcgctcaaccatctctacgacaattggaccatcgccggcaccatgagcgccgcctatgtgctggccatgagctgcgtcaccccgttctacgcccgcgccttcgaccgtttcggccaagcccgcgtgggccggcttgcgctcgccgtgcagatcgtggccatgctcgccttcgccttcgcggcgttggtgcgcgtgccgattccgctgctgttcgtcctggccatcatcatgggtctgacgcagttctcattcggcgcattggtccgaacacgctggtcctatgcgttgcgcggtgtggaagatggtgaacagctgctcaacacggcctacgccatggaagccgccattgacgagatcgtctttattctggggccgattctggcggcttggctggccacctccgtgcacccggtatcccaactgttcgtgcccaccgtggcatgcggtatcggcggcaccatattcttctcgctgaaatccacccagccaccggttatcgtggaacaggtcaccgtggccgcgcacgatgacggcagccctgctgcaagcgaagatgccgaccagctgaccctgcgccagctcaaacgcagcggcgccaagcccaagagcgtattgctctatgccggcgtactgccgttgctcgccgtgttcatcgtgttcaatatgagcttcacgtccttcgacgtgtccattaccgccaccatgaaatccatgggacttgagcccttcctcggtctgcaattggcgatgttcgcggtcggctcgtgcatcggcgcgctggtgttcggctcttgccgactcaaaggctcccattgggcgcatatggtgatgttcctgtcgctgctgaccgtcggctacgtgttcttccggctgtcaatggacaatctcatcctgctgggcgtcttcgaaatcctcgccggcctgaccgtctcgccgacgttcgccaccggcaacctcatcgtcaaggatctggtgccggcggaatccctgaccgaaggactgagctgggtaaccaccgcaggcacggtcggcacatcgatcggctcgtccgtggccggcattgtgcttgacgcctccaaccctcatgtgggcatgatgctgccattcatcttcacgctggcgtccgtgccattggcgttggccggatgggccttggccaagcggcgtgggtgaaacgggatcgggctatgcccgatggatggttggcggcttcgccggggtctctccctcagtccgcttcgcggccagctcgaacgcaattaatgatggctttcagccaactgaattattgctcactgtcgttcgccctcacctaaaaacgcctccggcgttttcttcacggttcggcttgtcagagggagctcgattctgtggacgggatattggcgtgagggcttggcggtgataggctgattgccgattggaaaacgttccgggtacattgccgggcaggtacgggtagacagggaagaagacatgatcaaggtttcggtggtcggagcaaagggccgcatgggctcgcacgtggtcgaagcggtgaacaaggccgaggatacgcagctggcgctcgcattggatgccggcgacgacctgacccaggtcaccaccgacaacaccgatgtggtcgtcgaattcaccgtgccgtccgtcagcctgaacaacgtgctgaccctgatcggccaaggcgtggacgtggtggtcggcaccaccggctggaccgacgagaaactcacccaggtcaaatccgccatcgccaacggcccgaagcccgaaacccagaaggtcttcatcgcacctaatttcgcgatctccgccgtactggccgactactttgcaaccaaggccgcgaaatacttcgaatctgccgaagtcatcgaactgcaccaccccaccaaggtggacgccccctccggcaccgccattcacaccgcccacggcatcgccgaagcgcgcaaggccgcaggactcgcccccgtgccggacgccaccgaaaccgatggcggctcacgcggccaggtggtcgacggcatccacgtgcacgccgtgcgtctgcgcggcctcaacgcccacgaggaagtgctcttcggcaacgccggcgagcagctgaccattcgggccgacagcttcgaccgcaccagcttcatgcccggcgtcctgcttgccgtgcgcaagctcgccggcgacgctccggctggcctgaccatcggcctcgaccacttcctcgacctgtaatcgacccgcagtcgaccagtagtcgcccccgcatttcaggcagggaagcgcgccgggacgcgcatcacggcattgccaccggttccggtcataatgccacgcattcagcaacaatcaaggtacgtaatgtaagagtccacaatgggaagtacggtgaacactatgagcgagcatgacatgcaccttcttgagccagcacctttcggccgcattctgccggctatggtcaccccgatgaaatccgacggcagcgtcgatttcgccgccgcgcagaagctcgccaaatacctcgtcgccgatggcgcggatggtctggtggtcaatggcaccaccggtgaatcgcccgtcacccatatggatgagaaggtcgagctggtcagggccgtcaaggaggtcgtcgacgttccggtgatttccggcgccggctccaacgacaccgcacacaccgtgcgtatggtcgaacagactcaggaagcgggcgccgacgcggtgctcgtcgtcatgccttactattcccgcccctcgcaggacggtatcgtcggccactacaaggccgtcgacgaatccgccgaaaagccgatcatcgtctacgatgttcccggccgtaccggcttgaaggtcaaggtcgaaacctacgaccgactggccggacttgaacacgtcaaggctgtcaaggacgccaccggcgatcttgcagccgcagtggagaagcagcagcgcaccggcctcgcctggtattccggcgatgacggcctgttcctgccgttcctctccatcggcgccgtcggcatcatttcggtgattgcccacgtcgcctccaaccccatgcagcagcttgtccaggcattcgatcgcggcgatatcaccaccgcccgtcgcctcgccaaccagctcgccccccttgtccacgcgttgaatggcgacggctatcaggccgtcatggccaaggctgcgctcaaggtcaagggcgttatcccctccaccaccatgcgtctgccgaacatcggtcccgacgccactcagcttgacaaggctgaagagggcatgcgcgctgccggactgctgtaagcccgaaacgctgcatacgggttgccagcccgccgcccctgcatgacagagcagaggcaccacaacagaaatcccaaaaaggttatggcacaagaacaaaagaaaacaagcaagaacacgaattctcgccgtcgcggttccgcgcgcggccgcaacgccaacggatccaacagccgtacgccgtcccgtaagatcaacgccacccggcaggccaccgcaccccagcaggatgccgtgctgatcgccccgccgaagtaccgcaagggctccatgcgcatcacgccgctcggcggcttgggcgaaatcggccgcaacatgaacgtgatcgaatacaacggtcacctgctgctcatcgactgcggcgtgctcttccccgaggaggagcagccgggcgtggatctcatcctgcccgatttcagctacatcaagaaccgtctcgacaaggtcgacgccctggtgctcacccacggccacgaggaccacatcggcggcgtgccctacctgctcaagctgcgtccggacatcccgctgatcggctccaagctgaccctcgccttcgtggacgccaagtgcaaggaacaccaccagaaccccaccaaggttgaggttgccggccgtgagaagctcaaggtgggccccttcgacctcgaattcgtcaacgtcacccactccatcccggacgccctggccgtctacgtcaagaccccggccggctccctgatcgacacgggcgatatcaagctcgaccagctgccgctcgaccaccgcatcaccgacctcgtcgaattcggcaagatcggcgaaaagggcgtggacctgctgatgatggactccaccaacgccgaggtgcccggcttcgtcaagcccgagacctccatcggcccggcccttgaccaagcgttcgcccaggccacccgcaagatcatcgtcgccagcttctcctcccacgtgcaccgtgtgcagcaggtggtggacgccgcccacaagtacggccgcaaggtcgtgttcgtcggccgttcgatggtgcgcaacatgtccatcgccgccgacctcggctacctgcacatccccgaaggcaccgtcgtggacctgaagcaggccaacgacattcaggacgacaagctcgtcttcatgtgcaccggttcccagggcgaaccgatggccgcactcggccgcatcgccgacggcaaccaccgcgacatccacatcaacgagttcgacaccgtgattctcgccagctccctgattccaggcaatgagcacggcgtctacaaggtgatcaacaagctcgtgcagctcggcgccaaggtcgtcaaccgcgacaacgccgccgtgcatgtgtccggccactgcaacgagggcgagctgctgtacatgtacaacatcgtcaagcccaagtgcgccatgccgatccacggcgagaaccgtcacctggtggccaacggcctgatcgccgtcaagaccggcgtggacccgcagaacgtggtcttggccgaagacggcgacgtggtcgacctgtatcacggcaaggccgcggtcgtcggctccgtgccgtgcggttacgtgtacgtcgatggcgattccgtcggcgagctgaccgatgacgagctggaaaagcgccgcattctcggcaccgagggcttcgtatccgcgttcgtggtggtcgacaccgacaaccacgaggtcgtcaccggcccgaagatctacctgaacgccgtggccgaggacgaaagcgagttcgacaaggtgcgtcaccagatcgtcgaacagctcaacgaccagatgatgcagggcacgcgtgacacctacaagctgcagcagaccatgcgccgcacgctcggcagctgggttgcgcgccagctgcaccgcaagccgatgatcgtgcccgtcgtggccgacatcgcccaggacgtcgaaaccgtagaaaccaagtagtccggattatccagggacgaccgtaaggagtaattgaagtcatgcccggttctaatctcactcgtattgaagccgaagaacgtaaggccgttatcgaagcgccgattcattatcacgtcgaccttgacctgacggtcggcgcgaagaacttcggttccaagtcgctcatctgcttcaacgcgaagcctggttcgtcgaccttcctcgacctgattgccgacgaagtgacatccatcgacctcaacggcaagtccctggacccagccgtggccttccaggacaaccgcatcgaactgaccgacctcaaggagaagaacgaggtcaccgtcgaagccaagtgccgttactccaacaccggcgagggcctgcaccgctcggtcgacccgtccgatggcaacatctacctgtactcccagttcgaggtgccggacgcgcgccgcgtctacgccgtgttcgaccagcctgacctgaaggccaccttcgatttcaaggtgctcgctcccgccagctggatcgtcacctccaacatgccggttgccaccatcgaggacgatccgcgcgaaaccctcgacggcaccctcggcgacaagccgaacgaaagcacccgtctgtgggacttcgagccgaccccggtgatgagctcctacctgaccgccatctgcgccggcccgtacgccgaatggcacaccgaatacctgaacgaagacggtcgcaccgtgccgatggcccagtactgccgacagtcgttggccaaggccttcgcgaaggacgtcgactacctgttcgacatcaccaagaagggcttcgcgttctacgccaagacctggggcgtgccctacccgtacgccaagttcgaccagatctacgttcccgaatacaacgcgggcgctatggagaacatcggcatggtcaccatccgtgactcctacgtgttcgagtccaaggtgaccgacgcgctggccgagcgccgcgtggtgaccgtgctgcacgagctggcccacatgtggttcggcgactatgtgaccatgaggtggtggaacgacctgtggctcaacgagtccttcgccgaattcacctccacgctggccactgccgaagccactgaatggcatgacgcctgggccaccttctgctccggtgagaagagttgggcgttgcgccaggatcagctgcccaccacgcacccgatcgtcgccccgatcaacgacctcaacgacacctacgtcaacttcgacggcatcacctacgccaagggcgcctccgtgctgaagcagctggcattctacgtgggccgcacgcagttcttcgaaggtatccacaactacctgaaccgccacgcctactccaacgccaccctggccgacctgctgagcgaactggagaagacctccggccgcgatctcaaggcctggagcgccaagtggctggaggaatccggcatcaacacgatcgccaccggcctgaccgtaaacgcggacggcaccatcgccgaattgaagctcacccagagcgcgccggccgaacacccggtgctgcgtccgcatcgcctggccgtcggcttctacaacgaagacgccgaaaccggcaagatcgtgcgcaccgagcagttcgaactcgacgtggatggcgaaaccaccatcgtcgaggccgcggcaggcaagccgcgcccggcattcgtgctggtcaacgacgatgacctgacctacaccaagattcgtttcgacgccgaatcccaggcattcgccgaagccaacctgcatcgtttcgacgatgccctggcccgcgccgtgacctggctcgccttctgggatatgacccgtgacggcgaattcccggccgaacgcttcgtggacatgaccctgcgtcttctggccacggaaaccgaatccaccaccttccgttacgcgctggcctgcatgagcaccaccgcccaccactacgtggcgccagcccgccgcgacgatgtgctgcgccacgtggccgccgagctgtggaccctggccaacgccgccgaagccggctcggacacccagttccagctcgccaccgcctacctgggctatggcgaggagggcgatgccgcattcgccgccaacgcacacggtctgctggacggcaccgtgcgtcttgaaggcctcgaaatcgacaacaacttcacgtggaccatcgtccaagcgctcacctccgtcaacgagatgaccaacgacgacgtggacgcgcagctcgccaagaaggagaccacggaaaaccgcgagttcgcctacggcgcccgcgcctccatggccacgacgcaagccaaggaatgggcttgggatcaggcactccacaacgacgagctgaccaactcccagctcgaagccgtggcccgtggcttctccgccaccccgcgccacgacctggccgagccgttcgccgcccggtatttcgaggccgtcgactggatctgggcgaacaagacctaccacatggccgaggccctgctcaacggcctgtacccgggttacgccgatcccgccacgctggtcaagctcggtgacgcctggctggacgagcacattgccgccgacaacgccctgaagcgtctgatcgtcgaaaacgtggcatcctcccaccgcaccctcaaggttcgcgaatacaacgaagcgctctgatttccttctggctcccctcgggtgcgaggggagttgtcgcctcaggcgactgagggaatcgcttccgcgaggagctacgtccacattccaacataaaacccgcaaccaatcctcaacagcgtattctcgctcaaggccggcaatgtgccggttgatgagcgacaaggatacggggaatgattgcgggcttttccataacttcattactactgattctgttggccggaatcggcgcaggattcgtgggctatgcggtaggcgcatcgtcactggtctcatacccggccttgctcgcgttcggcattccgcctgtattggcaaacgcttctaacaccgttggcgtggtcggcacgggcatcggtggcgtgatgggcgcgcgcaaagaactcaaaggccaagcggtacgctccattacgtatgtggtcattggcgcgttcggcggggtggccggtgcgtttctgttgctcaaactcgacccgagtgtctttgaattcgccgcaccagtgctgattttgctgagctcgctgatcatcgccatcaatccgcgcggccgcatgcaggccaagcaggccgccgcggatgccaccgcgcaactcaagcacatcgaagccactgaagccaccgatgccactgatgccgccaagcgcgcaaccacccctaccgcacctcaccgcccgccggaacaactcgtgcagcccatgagccaggattcctggtgggtatggctgggcgtggtggcagtcgccatctactccggctacttcggcgcgggcgccggcaccctggctctcgccatgcttgatgccgccaaaatcggcccattccacaagatcaatgcattgaaaaccctgatcggcacaggcgcgaacatcagcgcctcagtggtattcatcatccaaggcgcggtcgattggccggccgccatcatgctgtgcatcggctgcttcatcggcgggtacatcgccccgcccatcacccgcaagattcccgcaaacatcatgcgcgacgccgccgtaatcgccggcatcattctcaccatcgatctggggctcaaaacctattgattcgtgccttacactgatgcagtgaagcatacagcatggccgccaaccgcagcgtggccgcagaccccgataaggtggccaatgtctggcatttggcgactgcggaacctgagcgcctagaaaccaacgcggtaggcaaagaggtgagtgacttcctcgatccgccagacacgtcgcagattcacggcgttgcgtgccatgctgattggtggttcgcggcgcgagcaggtgctgttcgccggcgttatgaaggagctactcgcgcccatcaacaatccgcgatatgtcatcatcggcaaggaatggggcgtgcgcacgtacggtgtaagcttcccatgcccgtccatatttgcccgccgccagcaggacgccgaaatactgcgccgacagttggaccgctgcctgacgcattgcaccatggtatacacccgcactgaggaaggccggcgtacgctacttcgttgccaaacgcgttctttcctcaaccgtgacgaacaactgccgcgcatactgaccacaacatcggagtgatagatcgttgcatgcatagccgagaccactccggtagaggagatgccgttgggcatgttcaccgcatggctcagcgtgttcctcgccgtcgtgttgtatacgatcacgtttgccggcccattcgtgctggtacgccgtcttcgttcccgcgccagagcccatcgacctgcccggcatgcccgttaaccgatacttctcattgttcgtctatcgagcaaggtggcacgtacgctacttggtataggggagagtttctcgctgtctgtggtggaaaatccgagttttattatctgagtcagtgctttgggtttgcgttttgggctcgatttactattggacggcgatatccggggcgggcggctagctgttggggttcttgtcgcggctgtagatgtgtgttcggtctatcggtgatgcttgtcctgttcgtggaccgggcgaagtgcgggacgacgcgcggatttcgcggtttttcgtctgccgtcccgcagagagcccgggggatgattatggtccgtaacggggattggcgtgattgcgcggttctggcggttgatagtgtggaacgccacgaacgtcaaacgattgatttctctaccatcccacgttcctgcgggacgccgcgcggaaaccggccaaatccgcgtgccgtcccacaggcatgaggctgtattcggccggccactgtccatggcggacggacgaacagaccccactggc

SEQ ID NO: 3058 - DNA, 12620 bp, Unknown
  R19_24m  MAG No. k141_25676
ccgcatgattgcgctggaaaagaatccggcgctgcgtctcgcgccctcccctgccaaggactgggtgctggagctggcccggttcatcgccgaccgcgagaccacgaccaccgtctcgaaccttggccgagtcaccttggacgaacgactcgcgcgccatgtgcgttcggtgagcttcctcaccacaccggccagcctgaatttcacggtctgctcgtttggcgacgacctgagcatcggcatctccaccgtctaccatgatctgaacgtcatcaagaacctgtgtcggattctcgccgcgcagggcatcagcggccgtatgaacatcgccggcgcgcatgtggagaaaggagcgtcggcatgaagcattgcgatgcctgcaacgtcgatttcaccggcgatatggcccgttgcccactctgtcagaacgaattgcacggcgaggcctctcccgccgcattccccgcgcagcagatctatctgcgtccgaggcgtttggcggtggagatcatcacgtttgtaaccggcgcgattctgctgctgcatggcttcttcagctatctgttttcgtggccgataccgattgccagtgcatcggcagccgcgctgatcatcagcgtgctgttcatcaacagtgcgattctgcacgcgccgcggccgcttcgcctcatgtttcgatatttctatatcatgctggcgattgcgctggtctggtttgtggcgacgatgaatcatgtcgtcaccatgttcgtcataccgatcacgtgtctggtttcgctggtctttgacgtggtgctgcttatcgtgctgcgggccaaggccattgaccagtacgccaagtatctggcgttcgacatcgtcgccggtctgctgcctctgacgttcattccgctcggctgggctccgtgggatgtgctggtgatggtcagcgggctggtctccctgctggtgctgctcggcctgctcgtcttcgcccgccgtcagctcttctcggaattcggcaaacagttctcggcctgattgcctcgtgcgctcaatcgcccgacttagaatggaaaccatgagcgaacatgtggagcatgggtttgggccggtgtgggatggtgagtcccgggctttgattttgggatcgatgccgagtccgaaatcccgagcggcggcgttttactatatgcatccgcagaaccggttttggccggtgatgcaggcgctgtttgccaactccgctgatcctgccgacgccgtcggcgattcacctgagtcccgtcgtgcgtttgctctgcgccaccacattgcgttatgggatgtcattgcttcttgcgatatcaccggagccagcgatgccagcatccgcaatgccgcgcccaacgacttgacaccaatcttgcgcggagctccaatcgcccacatcttcacaaccggcgcgaaatcagcgcaactttaccgcaaacttatcgagccgcgcctgaccgaagccggtatcgccatcggcatgacccaactgccctccaccagcccagccaacgcctcaatgcgtttgccggaccttatcaccgcctatcgcgaagcttttcaaaaggcaaacgtactagagaatgcgtattggaaaaactaagtatggcgagaccatcaatctcggacggcaaacccagcatcacgaatcttatcttgcatctcattggcaatagcaatacagcgcgcccgcgaaataccagccttcacaccgacaccagtcaaatccgcaacagtgatgttcttcccctttccgttcaccgaagtagtgtgctcgccgttgattccagggttttccgttaaatcatatccaggcgacaatctccacgcttggcgagaacgatcatagagataagagaaattcttcgcatgatcgtcgcggtttccgatgaacacgttaaagcacatgagacggtacaaccgctcgcactcctctgcgctgttgcacacacgcatagtcagccgcatcaatagtccgtaatccaaattgggaatacgatgcgacgtttccagcaatccgccggcggaaatcatatgcaccttatgttcggtgccatcgtcatcccgcgtacggtcaaaccgccggacaccaaaatatccagaacattgcgctgatgcgaacagacgagtttccggcatatcaatgccgcactcgcgcgcaagtacagaaatttgatactcctgttctccgatattcgccgagtctacggatgaggggaatttgataatccattcttctccatcaacctcagtcagaattttcggccgcgcgccaccggacgagccaccaagggcaaaaagctgatccaaatcctcagaaaaatcagtttccaaaagattcgcgcactctctcgctatatcgtccaagtcagtagctgcaacaccattttcaatgtccgccgctggttcatattccaaggctcccataccgcttgatcccacaatggacagcctcgtcaaggttccgatagagtaagggtctattcctctctgacgcagaagacgatccgtgagcaaacgcccccacccgtccggcatactgtcatcgaacgccccaaacaaaccatgcaatggatctcttttggcgacaaagaccccctcacgcaatggcagactcagcggacttatgctgaatccactggacaaccacgagctttcgtacgagaacgccactgtttttgccggcgacagtgtcagcgagccaacaatttcaccatccaaaaacacccgtacccgatcaaccgataaatccaacggcactgtctcgctcatcgcgcttccctctcccgcgcagcaatgacatcatcgatagttgcatagtacggctgtgaaaacagtgtctcaaaatcctgctcgcaactcagcgcaaacgcgatattgatgagcgccgtcaatgagatttcgtgctgctgctcgaaccgtctgattgagccaagactcacaccggattttctagccagagccgtttgcgacaacttatgctctttgcgtctggcaaccatgcgttcggcaatagcggccgaaacatccccaggcataggctcatccaacaaagaaaacatactaatatattagcaatttatgcctaaaaagccaataattactcatatattagcagttactgattgcggcaaattggtcacgggactacaaccggcgtatcgcggtagccaccaacttgcgttcaagtggggttgaactgttttaatcgaattgttagcgttcacggccggccatgaagagacggcggtgacgattaatcatcaaggagtacacatgaagtatcgcagcgtcggcaagtcgggactgaagatcagcgaggtcgcgctgggcagctgggtcacggatctcaagggcacagcggccgagaacgtgaccaaggagaccgtgaagctcgcctacgattccggcgtcaacttcttcgactgcgcggacgcttactcgggcggcgccgccgaacgattcctcggcgaagtgctcaagcagtacccgcgtaaggaactcgtcatctccagcaaggtctacttccccaccggcgaaggcgtgaacgaccgcggcctgtcccgcaagcacattttcgaaagcatcgaccagacgctgaagaacatgcagatcgattatctggacatgtacttttgccaccgttttgacgagaccaccgaccttaccgagaccttgcgcgcgatgagcgacctggtcgcccagggcaaggtgctgtattacggcgtttccgaagagtggggttcggcccgcctcgaggaagcccagcgcattatcgaccgctacaacctgtacccaatcaccgtggttcagccgcagtacaacctgcaggatcgctatatcgagcatgagatcatgggcacctgccgcaagctcggcattggtatcaccacgttctccccactcgcgcagggtctgctgaccggcaagtatcgcaagggccagccgctgccggccggctctcgcgtcacgtgggctgacgaatctgagacttcctccaacgggagcgattgttaagcgccgaaatcggtatcgccttgggcctcggcctgggcgatggcggtttcggcgttttttgctgtttgctcaatgacctggttgtatccggtcaaggccgcgaacggcatgaactgggcggcccgctggtggcgggacatatgcggatgcttgcgtgattggtggtgtggcaggttgatgatgtcgtcgtatgcatgggtttcttgcagggtcatgcgcgatggcctccgatctgacggttgcgagcctgaccggtggcaccgtcttccatatccatggctttgatgacggcgttgcggccgaatttacgtttcacatccagcagcgcacgctggatatcatgctctcgagccaacgtctgtgcggcggcatcgtccccacaagccggcatacgcccgcttccgtcgccaccggattccgtgctatcacagtcatatcgcatatcgccatcatcaccgaacaaatcaagctgctcatagcgtttgcccgccgccagttctttgggcgtggccacatcatcggcaacaactgtgagtcgacgcaccagcaaccgcgcatccacaatacgctcgtacagcatggtcatcgcctcgcgaatacgtgcggcagacgacgtaaaatcgcccaatccaatcgaccccacggccgacttaggcacccgacgaccgaaacggtcaacggtcaccggcccttgataggtctttgccgcgcgttcggcggcacgcctcatcgcccggtctgcgcatgaatcaagcttcgaagcatcgagactgccaatgtcatagccgaccgccagtgtcagccgattcgtcatcacccccttatcgaccagatcgagggcgagcgcatcggccatctccttggcgatcagccgggccgtggcatagtcggcgggaccggtgagcacctgaccgctgctgatgctgtgcgcatccggctcataggattggatgtccgcgatttcgcacggctcccagccccacgcatggtcgatgagcagttcggcattgacaccgaacatgcgatatagcaggtcttcgttgtagtaatccgaagcacgacccaccgagcatcgggcgatatcgcccatggtcatcagaccggcgtgctcaagtttcctggcatagccgcgcccaacccgccaaaaatcggtgagcggacgatggctccagagcagccgacgatatgacatttcattcagttcggccacgcgcacgccgtccttgtcggcgggcatgtgcttggcgacgatatccatggcgactttggccagatacatgttggagccaatgccggcagtggcggtgatgccggtttcatcgagaatttcgcgcacgatggttcgcgccatcgcatgcggccccatacccagcgagcgcagatatggcgtgacgtcgatgaacacctcgtcaatcgagtagacatggatgtgctcgggtgcggcgtatttgaggtagatgccatatacctgcccgctgacctccaaatagtgcgccatgcgcggcttggcgatgaccatcgaggctttgagtctcggcgagcgttccaggtcgcgcgcatcgcaggactccccgattaatcggccgccgggagcatggaccgcgcgctcgatgttgactccattcaggcgctgttttacctcgaatagccgcgcacgaccgggaatgccatagttcttcagcgagggtgagaccgccaaacatattgtcttatcggtgcgggtttcatcggccaccaccagatgcgtggtcaacgggtcgagtccgcgcgccgcgcactccaccgaggcatagaaggacttgagatcaatggcaatataggtatgctcgcgttgcgtcgataccgttccgctgcccatcgccatcacctccttaccaccgccggcccgaccagcatatcaatacggtcgaacatttgttcgatacaacatgtctgttcgaagctgccgaagtcgacgcacgcaacgcgcccaagcacgctcttcacccacaccacacgcgcagcggcagagcagcggcatgcatgcgtaccatggggaatatgaagaaaagcattacggcagacagcgattttgcggcgtgggcggcagcccgatcccagaaaacgaatcgatcactggcaggagcccgcctcgcgattccggagccgcagaagcgtgccgaaatcaagtctcaggcccagcaatggggcatgaccgtcgaagatgccacgatgaccgacgggcacagcgaggaattcctctgtgacggcacacaaagcattgattccattgccgacatgcgcacggcaagtgggctggaggcaatggagtacgcggaacagcacatgccggtattacgcgacaccatggatgacctcaccacccgcgtcgatttctcaggcattcgtattgccgtctgcctgatactggagccaaaaaccgcgattctgctgcgcaagcttaaggccgccggcgcaatcgtcggcgtatattgcggcccggattccacggatccccgagtggcggaacagctgcgccgagaaggaatcacggtcgaatccagccgagcctggaccgcggaacaggcgcacgaggcagccctgcgcctgctggacaagatacagccgaacatcatcatcgacgatggtgccagcttcgcccgcctcgcctcgctcgaacgccccgagctcacggcgaatctcattggagtggccgaggaaacgaccagtggcgtacgcgcgttccagcagatgcaggaagcgggagcgctcacctacccggtcgtagccgttaacgacagtgtgctgaaaaccggattcgacaacgcccacggcactggggagacatgcgtgaccaccatgcagcgcattctcggcgagcatgcattcgacggcaagaacgtcaccgtcatcggctacggcccggtcggccaaggcttcgcacggcgtattcgcgcgcttggagccgaagtcaccatctgcgatatcgatccagtggcttcactcaaagcggtgttcgacggcttcgccgcacaagacattgacgaggcactcccttgcgcggatatggtggtgtccgccactggcgtgagacatacagtcacacttgagcacatgcgcgcaatgcacgagggcgcggcgctcgcagtgatcggcggcatcgccaacgaaatcgccttggacgaggtaagcgacttcatcccacaggtcaacagggacaccgcgcaactcattgttcccgacggaccaacgctcacgctaatcgccgacggcgatggcgtgaactacacggtgggaggcggcaatccaatcgagatcatggatctgagcttcgccgtacaggccagcgccgtcgcatatcttctggaacatcgaggcacactggatcacacgcttatcagacttgacgcagcgaccgaccagcgcatcgccgccagcgcgctcaaggcgcgcggataccgagccagccatgccgtggaggacaacggctacgattggcgactgaccagattcgcggaaaacgaccgagagaacgccgaccgatagccataggcacggcaccgaacacaacgcagcgaggagaatatgaccgacaacacctggccgaccgtcgataccgagcttatcgatgatgtgacactgtattccgccaaactcatcatccccgtgacgggccccgtcatcatcgatggcgcagttgccatacatggcgaccgcgtggttcatgtaggtaaacgccgctgggtgctggaggcgctgaagcaggaaatgacgtctcacggcaccatccgtgaacggcattgggatggggtgctcacccccggattggtcaacgcgcacactcatctgcagtacagcggcatggtgcaggtcgggcaaggcacctacgatcggttccgcgcctgggaactggcattcaacgaggtgtacgccgaggcgcagaagacccagccatggaagcagtgggccgaggacggtgctcgccagatggtcgaatcgggcacgacggccgccgcagacatcgtcaccgatctggacgccgccggcgcgctggcttcgcagggcatgcacggcatcgcttattgggaggtaatgggctggcacaacgacgaatggatggaaaagggccgcaccgagctcatccggcagttgcgccggatgaacgaggagcagctgccgaacctcggcatcagcccgcatgctccgtatacgctggagtccgaaccgttcgttgatcttccagacattgctcgtcaactgaacatgcgactgcatatccatctggcggagaccccgctcgaggccggcacttatccgccggtgctcaccacttattcggcgtccgactggcgtgaccacgattgggaaagctaccggcagctcaaagacgtgggcaaaggtgcctccgccatccagttcgtcgatcagcttggctcgcttggcccggatgtgcacattgcacacggcgtgtgggccaatggcgaggatcggcgtattctacgtcagcgcggcgtgggcgtggcattgtgcccccgatcgaatcgcattaccaacaccggcaaagatgcaccggtgcgcgaatacctcgaggaaggcaatctggtaagcgtgggcaccgattcgctctccagcacgcggaccctcgatctgcttgatgacgtgtcgatgctttacgacctggcccgcgaacaaggctatgccagcgacgatctgacacatcgcctgattcgtatgatgacgctgggcggcgccgcctccatgggcatgcacgtgggccgaaaccgcattggacagatcaacgcgggcgcattggctgatttcgcgttcttcgacatccccgtcgacacatcatctccggccggcatcgaagaaacgctggaaacactggtgaagcacggcgcaggcacgaaccgagccacggtgatatccgggcgcgaagcctacaacaacgcctggtgacaccgctgacctgacctgacctgacctgatatcaagaagccaaaaaccagcaaacccgccaagaacaggagatctcattatgagcgtcgctttgcgagacatgagtccatacgcccggtccatagtggaacgccttggactggaagcccaccccgaaggcggctggtacacgcgtgactggcaatccccgcacacggatgaggcctcaagccgaccgctatcgtcactgatttacttcctgctgcccgagggagatgccagcgcctggcataaggtcgatgcggatgaggtctggctgtggcatggcccggcatcggtcaagctggaactcggcggcagcggcgagactccggaatccgacgaatccaagcgaaccgtaatcaccctgggttccggcatcaccaccgatcaggccgacgtaaccgtatcgggacatgcggtcgtaccggctggcgtctggcagcgcacagtgcctggccagggcgatgcgctggtctcctgtgtggtcagtccgggattcgtattcgacggcttcacactcgaacagtgaacgccatttcgctctgcgccaatatgagatatccgttcgcttacgcgccagattgcgcggctctagccggccataagcaatggagataaccagcatccgagaatatcgctgttttgtagtaacccaatagccatacaattggcgcgcatgcatcaagcacggctttgaaccgtgtgcatgacgaacacttgaggagaggaagcccatgttcaataagcaacacatcgtccgtaccattgcggccaccgccagcatcctagctctgtcgttcaccgcagcctgcggttccggccagtccaccgcatccaattccgccgattcgaacgatatcacccagcagacgtacaagccgggcaagctgaccatcgccaccggacagccggcctacgagccgtgggttatgaacgacaagccggaaagcggtgagggctacgaggcggccgtcgcctacgcagtggctgacaagctcggtttcaagaagagcgacgtggtgtggacccgcaccgcattcgacaccgccatcgctcccggtgccaaggactgggatctcaacatccagcagttcggcatcaccgacgagcgcaagaaggccgttgacttctcgtccagctactacaacgacagccagtccgtcgtggtcaagaaagacagcaagttcgccaacgccaccaaggtatccgatctgaagaatgcgaccgtgggcgtcatggtcggcacccttgcctacgactacgccaaggcgaacatcaaggacgacatccagacgttcaatgatgatgccgcactggctcaggcacttgacgccggtcagatcgacgcactggtcaccagcaccgtggaatgcgtgtacatggtgcagtccgagcaggtcaaggacgccaaggtgctcggccgtctgcctgactccgaagacaagagcggcatgggcatcgtgctgccgaaggattccaagctgactgcagccgtgaccaaggcagtggatgacctgaacgccgacggcaccatcaagaagcttcaggacaagtggctggccgagtacaccaccgacctgaccgaactgaaaaagtaagtggagtaggctcacatcataaggtcacaacaccttggccgggcgctgcggaaattttcctgcgacacccggccattccggcattcaggaagcgagcgacattcatcacatgaccgcagcaccaaccgaaaccaggcagtacaatgcccctgacggacacgaggtaagtcaggtcgagctcagacgacgccaatatcgtgttcatcagcaaattcaatcgacgattaccagtctgatcagcaccattgtgttcgttgtggtcatcgtcatcggcctgaagctctcccccggctggccacgagtcaaggagaccttcttctccggcgaatacttcgtcaaatcgtttccccatgtgcttgacggcctatggctcaacatccgcgttctgctcgtcgcagtggtcggcgtggcgattctaagcacgctgatcgcattggtgcgcaccagccgctcccctattctgttcccgctgcgtatcctggcattgatctacacgactgtgatgcgcggcgtgcctattatcgtcgtgctgtatctaatcggtttcggcattcccggcctaggcttgttcggccgtatcgatccctcggtactcggcaccattgcagtggtaatgggatacagcgcctacgtctccgaggtgctgcgtgccggttttaacgacgtacatccttctcagcgagcctcggcccgctcgttgggcctgacctccggccagacgacccgactgatcgtcattcctcaggcattgcgcaaagtcgcgcccgcactgatgaatgacttcatctccatgcaaaaggacgtcggcctgatttccgtgctgggtgcggtggatgccgtgcgcgccgcacagatcgacgtggccagcacctacaacttcacgccgtatgtggtcgccagcctgctgttcatcctgatgagcgtgccgttcatcctgctgaacgactggtacacggaacgtctgcgtaagcgcgaactcagcggaggaacggtatgagcgaaatgaccaatatcaccaccgaggcgagtgactcccccgtgagcaacaagacggtgctgcgtcttgatgacgtgcgcaaatcctttggaaacacgcaggtgctgcgtggcatttcctttgacattcaccaacatgaggtggtggctttgctggggccttccggttcgggcaaatccacattgatgaaatgcgtcaacctgcttgaacaggtcgatgacggccagatttggctgggcaataccgatatcaccgacccgcgtgccgaccaggacaagattcgcgcacgtatcggcgtggtgttccagcagttcaacctcttcccccacatgtcggtgctcaagaacgtgacccttgccgcaatcaaggttcaccactggagcaaggatcgcgccgaaacccgcgctatggaactgcttgaacgcatcggcatgcgcgataaagccagcgcctaccctgatcagctctctggcggccagcagcagcgcgtggcgattgcgcgcgcactgatgaccgacccggaactgctgctgcttgacgagatcacatctgctcttgatccgatgctggtcggcgaagtgctcaacatggttgccgagttaaaggcccaaggcaccacaatcctcatggccacgcacgaaatgagcttcgcccacgacgcggccgaccgcatcgtactgctccgtcacggcgtcatcgccgagaacggcacacccgccgaggtgatggacgagtcgcaggatcccgagaccatcgagttcttcagccatttcaggcactgagacgaagccgaaaaacaaacaccggattcatacgacgaaaggccaaaatcctaagccactattcatactcaactgatctggtgcttaaaccgcgtccgcgaaccccaacaagttccaccaccccacaacacgcgatgtagccgccgattggtagggttggcagatagttaatcccctgtttgaaaaaggagctttggcttgtcggctgaactcgaagacattcatgaggaatgtggcatcttcggcgtatggggc

SEQ ID NO: 3059 - DNA, 8410 bp, Unknown
  R19_24m  MAG No. k141_26162
aacaagtgcgacatggtcgacgatgaagagctcatcgagctcgtcgaagaagaggtccgtgacctcctcgacgagaacggcttcgatcgcgactgcccggtcatccacacctccgcctacggcgccctgcacgacgacgctccggaccacgagaagtgggtccagtccgtcaaggacctcatggccgccgtcgatgactacatcccgaccccggttcacgacctggacaagccgttcctgatgccgatcgaggacgtcttcaccatctctggccgtggtaccgttgtcaccggtcgtgtcgagcgtggccagctggccgtcaacaccccggtcgagatcgttggtatccgtccgacccagcagaccaccgtcacctccatcgagaccttccacaagaccatggacgcctgcgaggctggcgacaacaccggtctgctgctgcgtggcctcggccgtgaggatgtcgagcgtggccaggtcgtggccaagccgggctccgtcaccccgcacaccaagttcgagggcgaagtctacgtgctgaccaaggacgaaggcggccgtcactcgccgttcttctccaactaccgtccgcagttctacttccgcaccaccgacgtcaccggcgtcatcgagctgccggaaggcgtcgagatggttcagcccggcgaccacgccaccttcaccgttgagctgattcagcccatcgccatggaggagggcctgaccttcgctgtgcgtgaaggcggccacaccgttggctccggtcgtgtgaccaagatcctcgcctgattatcatcagacaagaatcttcgcttgaactagcgacttaggaaatccccttcgaggaaactcggaggggatttcctataaccgcagcaggatatggatatgtaccacgacttccggcctggatgcgctagtgttgctttccaatagataaacggactgctgcactgcgagggtatgacactgatggcaggccgggaaagaaggtcgatgatgactggttcgcaagccgcacactgtggttccgtatccgcgctttcactgggactgcccgtctccacggcgattcccgaagccaaaggcacactgccgaaagccttgttcgtgggcaaggcaccgatttcaggcaaactcaagcagcgattggtgaacgaaatcgaatccattaccatgctggcgttggtccggtcgattaacactgggcttgcggacggcaaactggttccggaagtgctggtcatcggactgaagcttacggccaaagccactggcataccgaacgaggttatcgatttgattgccgggcagcgtaaatcgggcatcgtgttcgtgtgcgtacgcgacgtgccgttcgagggcagcacacgtgaggaatgtgcgttcgccgtgcgtcgggcgataccggggcgtgccggccacacgccgatctatcgggtatatgccggcgattggcagccggcgggggaggcccagctggagctggccggctctactattgatgagctgtgggcctcgctgtgctcacagaccattctgggcacgccggagatcgaaaatctggatgcgcgcatcattcgccatactgaaattgctcggctcgaatccgaagtggacaagctcacccgcgaccatcagcgcgtcaagaatcctgttcagcgcaatgaaatctatgccaagctccacaagaccaaaacacagctcgcaaaactgcgcgaagcatagtgatatgaaaaccattggggtcccgctggcgggagctggctcgcaaagcgagactgagggtggtccaggtccgtggcctagggctacgcccaagctaattgaaatattcgtgcatcatacagcgtacagttaaaccatgttccctctgctcgaaaccctggtcgccgtatacgaggtgggccagttcacgctggctgccgacgaactgaaggtgtcgcagtcgacggtgtcgtcgcgtatcgcccaattggagcagatggtcggcgcgccgctgttcgtgcgcaatgcgaaaagcgacgtgacgcccacacaggccgggcggatgctgtaccagaccgccatcggcatcgacggattatggcgggatacgcgtgagcagatcgcccgcgtgcaggaggcgcgtgagccgctggccgtttcgttctcgcacacgaccgcggcgatcctgctgccgaaggcgttgccggtgatggctcggaacatggacagtttcgacttcgccgtacacgtgatgaactcggatgcgattctcgaacgggtcagcatgaaggccgtgcagctcggcgtggtggaaaagccgatcgtgaacgattcggtggaccgcgtcaccctgtgcgaggaccggctggtgttggcgggggagcccgacggcgtgtggatggtgcgcgagcacggttccggcgtgcggtattacacggatttgtatttcaagaccgctcaggttgtgcctgcacgcacgatggaagtgtccagtaatgcggcgattgtggcggcgctgtccgccgggttcgggcagtcgttgatttcggaagccgccgtgccggcgggcgtgccggtgcagcgggagcttggcgatgagtttgtgcggcggttctatgcgctggtgccgagatccggtctgacgcacgatcagcgggagttggcggagatgattattgctgcgctgcgcgggtagtcagatagtcgactgagggaaggtcgcgaacgttgtttctctccctccgtccgcctgcggcggccacctccctcatcagagggagatcaattaggtatcgacaaaatcgatgatatgtattggttgcaatgatttgaccgatgtaaatgcttgagcttcaatagacaccgtgagagagttctgtacaaaatggtggaagcgcattaccaccgttgacatgttgttcattggcgttctgactctgctggcctcgctgttcgcctcctggctcaagcagttccccggattcagcctgttcggcgcgcttatcatcgcgctgctcatcggtatgatcatccagttaccgatccgcagtgcctacgtcggttccaatgatggccgcaaggcaggcgtcaaggacgccgctggcctgatttccaacaagctgctgcgcctcggcatcatcctgctcggtttcaagctcaacctcgccgtgctgttcacgcagggcatcaagtgtctgccgatcgcagctgtggtcgtcacgctgaccatcatcgtgtgctatgccatcgcccgcaagctcggtgtcgacccgatgctcgccatcctgaccgccggtggcaccggcatctgcggtgcggccgccgtcatgggtctggccggttccatcaaggtgcctgaggacaagcaggacgagaaggacaacgacgtgaccatggccgtggccatcgtagccattatgggtactgtgttcgcgttgctggagatcgcgctcggcccgctggccggcatgaccaaggaccagctgggcatcaccgccggtgcttccctgcacgaaatcgcccacgcggtcgccgccggcgacgctttcggcgcggtggacatcgccaccatcatgaagctttcccgcgtgctcatgctcgtgttcgcggccatcatcatcgctatctggtgggagaagaagcactccgaggtggagaacaccggcaagaagaccgtggccttcccgtggttcatgctcggcttcatcggcgcttcgatcatcggcaccttcgtgccgctcatcgcctccatcaccccgcagctcgtggactttgcgtacatcgtgctcggcatggccatggccgcgctcggcatcaacgtgaacttcaaggccatcgcttccaagggcaagaagccgatgctcgccagcttcctgacatcgattctgctcatgtgcttcgccgcaggtgttgcgatgctgttcttctgataagcgctccaaatacaaataggcgaaggcgaacgacagtgagcaattggaatgtgtcacctaaaaatcacgtacttgcacaacggataaccccagccgaactggcaggccatcgcaatgaacttcaccacatacgggctcaggtccgtcgcgcccggcatccagccgatcagcagtgtgctgaacgtgaagttccagatccacagcagcacgaaaagcatcacggaacgggtgaagttgcttgacgatttgaacgtcacgttgcggttcatcacgaagttgtaggtcgccgaacacaccacggcggtgccgttggcgatctgtgagggtacgccgatcaagtgcaggatggcgaacgtcgcatactccacaatggtctgcgtggcggaaacacccatatacttgcccaacacggcgagtccattttgcttcggggttgccgtgcccacggtattttccgcagtattcgttgtggtcgaggtatttgtggcgcccacaccttgattcggcttcacatccgctccattgttcgccatgcccatatacctcccggatgtacctgtgacgttcgacctcgcaatgataccgctgaccgcgtcgggaatcgtcgtggcggtcagacgagaaaaccgcaggccgcagcaacgaccggcacacccagcgacagcaccagataggccgttgccgtggggtagcggtgtttgtggaagagcgtcaccatttcgttgatcgcggtcgagaacgtggagaatccgccgaggaaaccggtggccagcaccagccgccacggttcatcaagtgtcccgcccagtgccagcgccgcaaccagaccggtcaggaatccggcgatgagattgatggtgaatgtggacagcgggaatgcgcgttgccaatacgttttgatggtcgcgtcaagcagatagcggcaggaggcgcctacgccgccgcacaggcagaccaagattggtaggaatacggtcatcacgccttacctcccttgctggtcgtagcggcattcgtatcagcggacgcttcggcggatgcgttcgaggagccggccagatgcgttcctgcccacacgccggcagacgcacaaaccagacccagcgcgaatgtcaccagtagataggcaatgccggctgccacctgaccgtcgcgaatcgcggtgaagccttccaatgccaacgtcgacatcgtagacaaaccgccgcatacgcccatgccgagcccacggctggtgagctccttggcacgcgtgtcgaaccgggaagagccggccaaataggcggtcagacccgcatagcagaagcaggccagcatgttggccacaaacgtgccggtatggaagctgccggctgcgggaatctgcgcgaacgcatagcgaatcgcggtgccgatggcaccgccgcagaagacgaccaacacaatatcaagatggatatcggggagtttgtgcgccggaggagtggccgtgcgcgtgcccggccgggcatctgcggatggggattgcgagcccataatagcctttcctgaaaccgctgaatcctgctgaagacacaacgatttcatgcaatgtcaaatcgtgtgtaggaactatcagcagtgtgcggttcgaaacaagttcaggcgggtcccatcgccggttctccagattactcatggcgacgaatcgaacagtgagcgtatctcggatattggcctatcgcagtgaattgctcggttgttgccatacctcatgggtatggcgaaacatggtttatggctattggttaatgcaaggcgattattgtctaatagaacacgaggatagcgggccttaagcgctcgatgccggaaaacaaggagttatgaacgtatgtctgaaaccatgaaagctgcgattttcgtggagcctggcaagatggccgtggaagaagtgccgaaggcgacgcttgaacaggatgatgacatcgtgatccgcgtggtgcgcacgtgcgtgtgcggctctgatttgtggttctttcgtgggctgagcggacaggccgcgcacagccaggtgggtcacgagtccatcggtgtggtcgaagaggttggcgcggcggtcgaatccgttaagccaggtgatttcgtggtcgtgccattcccgtacagctgcggcaagtgcccggtgtgcaaggccggcttcgaatccgtgtgcccgcacggcggctacttctccgcttgtcaggccgaatacctgcgtgtgcccgaggcggacggcaccgtggtcaaggtgcccggttcaccggaagactacgatgacgcgacgctcgcttcgttgctgaccgtttccgatgtgatgtccaccggttatcacgcggcggtttctgccgaggtcaagcccggtgacaccgccgtggtcatgggcgatggcgcagttggcctgtgcggtgtgattgccgccaagatgcgcggtgccacgcgcgttattgccatgagccgtcacgaggatcgcgcggcgctcgcccgcgaattcggtgcgactgatatcgtgcccgagcgtggccaagaggctattgacaaggtgctggagatgaccggtggctatggtgcggacgcagttctcgaatgcgtgggctccaaacagtccttcgacacggcgattggcctgattcgccgcggtggcgtgattggtcgtgtgggcctgccgcacgacgtggagatcagcgccgaaggcacgttctacggcaacatcggcatcaagggcggcccggctcccgtgcgccactatgacctcgatgacggtctgctggatgcggtgctcaagggcgaaatcaaccccggtcgcgtgttcaccgccgagtacgacctcgaccatatccaggacgcctacgaggcgatggaccagcgcaaggtcatcaaggcgctgatccggttctagggtcaggtgcgcagagaacggttctcactaagaaccgtgtgagccattcgcacaaaaccgcacaatcgaacaggccgccggtgtgatgggggagagattgggggggtgagccggttcggcttgcgtccttataccgttgttttcgtgtagaatcggctacctctatacctctgttttcgtgtagaatagcatatgcccatactgttgttttcgtgtaatgaggtgattgctcatgttgaagcgcaagatgctggataagctgatcgcatggaaacaaaaagcgggtgggcgtgaggctcttctcatcgaaggcgctcgccgtgtgggcaaaagcaccattgtcgaggaattcggccgcattcagtacaagtcatatattctcatcgatttcgcgcgtttgccgcgcgacgttcgcgacatcttcgaaaaccagcgtgatgactttgacacatttttcatgctgttgtctgcgtattaccgcaagcgactgtacgagcgtgaatcgttgattattttcgacgaggtgcagcggtatccggcggcgagggagctcatcaaatatctggttgcggatggccggtatgactatgtggaaactggttcgctgatctccatcaagaggaatgtggcgaatatcgtcatcccctccgaggaacggaaaatggacatggggccactcgattttgaggagttctgctgggccatgggggaggagctgcttgctgaaacgattcgcaaatcgttcgagcgtctggtcccgttgcccgatgcgctgcacaaacgagcgatgaggctgtggcgcgaatatctgctggtgggcggtatgccgcaggcggttgccgattatgtcgagcagcgcgattttggcgaggtggattcgatcaagcgtggcatcctgcagctgtacagtgatgatatcggcaagttcgccaatggcgatgccggccgcgtgcggggcattttcgctcagattccagggcagctgtccaagcatgagaaacgattcactctggcatcggtcgataagggggctcgatctcgtgaatacgattcggcgttcttctggttggaagacgcccgcttggtgaacctgtgccgtaattcgactgaccctttggtggggctgggattgtacgaagataacgattcattcaaatgctatatggcggataccggtttgctggtgtcgcaggcgtttgccgatcgagagacaacgccggatgatgtgtaccgggatattctgttcgataaactctcgctcaacgaagggatgctggtggagaatgcggtggctcagcaattccgggcgaatgggcgcaaactgtatttcttctcgcgctcggatagggcggatgccacgaaaaccatggaaatagacttcctcatcgttcgggaatacgataatgccgcgatgaagcctcgcatcagcccgattgaagtgaaatccacgaaacgatacggcgtatcttcgctcgacaaattccgcaaaaggtatgcccaacgattgggcaaggaatacgttctgcatccccgccaactcgaagtggatggagaacgcatcaagctgccgttgtatatggcccactgtctgtga

SEQ ID NO: 3060 - DNA, 2959 bp, Unknown
  R19_24m  MAG No. k141_26882
ataggcgccatactgtccatcgtcgttcggtggcgtcgttgctatgaccgatccaagcactggacgatgcgctggccgatacgttgacccgctgcggcatgatgccgatgatgtcggctggatggtgaaccgcactccgcttctgagcagaaggacgggagctgggcacgaagtcgattgtgacatacgacttgtgcccggcttccgcttcgttgagaaacttcacgcctgtcgcctcccgtggattagacaactgaaggtccgcgatgaaaacgacgagacgtttatgatcgccgacttccctgggcaccgtagctgcctgatcgcctttcatccatatcgccccggtcaggtcgtcacctacaacggcggcagcgtcgccaccggcagcaacgccccaccgtcccgtaccgtgaccgtccgtgcagaccctcggccccgtatggggctggacgtgggccgatccggccgcgacgaccatcagcgccgtcgccctgaccatcggcgtcgtcatcggcgccagcgccctcaaggccaaggcatccaaggccgaataacaagaagcccccgaacctgaaccgtatcacgcggcaggttcgggggcttttcgccgtatatgggtcaggccatcgcgggctgtgcctgattggcggtcaggtatgcggccagtgccttgcggatcagagcgctcttgccgatgtgctctcgttcggcctgtgcccgcacctgtgcgtccatgtcgggcgtgaggtatgccttgtagagcacgtcggccttccggcggggctggtcggcgagggggcggccggcgaagatgtcgtcgatgtcatccatcgtgatcgccctttgcgggcggatggtctcgccgatgatggcgggggtgtgctcggtgtattcgtccgagagctcgtcccagtctgtttcgttgctcatgatgtcctccttggtgttttttagtcgtcgaacttgtagagccattcgcggcggcagtccatcgcgtggaacaccttgcgggtgcgctgggataccagcagctccacggggcgttccctgaactcgtccgggtgtccgaggatcgccatgaccctgtcgccggcgtgtctcgactgcacctcgaacacggccaccggatgccggaatatgtagtcgatctgtggctgtgtgaaccagtgcttgaaggctgacggctcgcattcgatcatgcttattatggtaccataatttagtaccacaatcaatttagtaccacaatcaagtcggggaaacggaacatcgtgatcctcctaggcggcgaggcgcgtggcttccacggcggcgcgcagctggtcgtcgggcatggcgatgtaccgttgcgtggtctcgaccgaggcgtggccgctccaccggccggggaacagatagccgttggcggatcggatcagcagggcgaggtcgtcgccctccacgtccctagatcgcccttaagcgccctcgacaatgcggacatctggcatcggcgctgccgatcgtgttgggggagtagcccgccgccttgagggagtcgagccatagattgattgattctgcccagagcgggcttggatgttgttttttcacaggacatcatcgccccgatcggatatgcggccccgtagggcacgacggcggataaacgaaaagccgtcacgaataatcgtgacggcctcgcccgcagtagcggggcatggatttgaaccatggacctctgggttatgagcccagcgagctaccgagctgctccaccccgcgtcggcttgtctctcagacagctctatctacaataggtgcagattccagaaagtcaacatcggcgtgtcgtgtcattttcccacggttttaaaacgtgaatcggctcacgcagcgaggggtttggggcggagccggagtcggggtgataacgcgccataaatggccgttataggaatgccctgaaccgttatcccgaatattgacataataggaacatgcctatcaagatccccagtggcctgccggccagagatatcctcgattcggagcgcatcttcgctctggagaagcccgaggcggagcgtcagcgcgtccgcccgctcaaactggtggtcctgaacttgatgcctaagaaaatcgagactgaaacgcagctgctgcgtctgatttccaagtcgccgctgcaggtcgaaatcgacttcatgaagacctccacgcatgaggccacgcacgtttccgccgatcatctcgtcaagttctacgaaaacctcgatgcgttcaaagacaactattacgacggttttgtggtcaccggcgcgcctgtagaacatatgccgttcgaagatgtggactactgggacgagttcaagacgattctcgactgggcctccacccatgtgttctccaccatgtacctgtgctggggtgcgatgggcgcactgtactaccgctacggcatccacaaggtggattaccccgagaagattttcggcgtattcccgcagtacctgcaggacgaatactgcttcctgaccaatggcttcgacgagattgatctgcagccgcactcccgcctcgccggcgtgaacgaaaacgaggtacgtgccaaccatgaccttcagatcttgacttgggggccgcagtccggcccgggcctaatcgccacacgtgacttctccgaagtgttcgcgctcggccattgggagtacggcaagtacacgctcgccgaggaatacgagcgcgatatggccaagggcatgaccaacgtgcccttcccgaagaactacttcccgcatgacgatccgaagctggaaccgttgttcgtctggcgtgcccacgccaatctgctgtggcgcaactggctcaactgggtgtaccagaccacgccgtacgacctgaccgaggtgccgcagctcagggctgagaagaagctcggtactgatcgttcgattcggcatgagccgggcgggcc

SEQ ID NO: 3061 - DNA, 8450 bp, Unknown
  R19_24m  MAG No. k141_27840
aaacatgtggtgatgattggcggtccgcgagatcaattcttcgatttggctgcgcgcggagaagtcgaggaaggaccgttcgatttgggaaagaccacgttcccgacggtgcgctattacctcacgttggaacaggaattgacctccgcaggcgtgaaatacgagtacgttgaagctggcgaagtgatggattttgccggctatcatcgtgcggtcagcaatgcgctcgacaaggtgacgaccgacggcgtcgatgccgtggtcagttccgatattggcgcgtcgttctgcgtgcgcgaagcgttgagccgcggaatttccattcctgacgagctgcagatcgttgcctacgatggcacgtatttgactgatttggccggcatgaagctgaccgcggtcgcgcaggatttctcggcgatcgcacagtcggcagccgaccatatcgtgcaggctattgccaatgaggaagtggccgcggctaacgcttcacgcaggaacatccccaagccattcgagccgaacgtgcttattcccatgacgctggtgccaggcgataccacgcgttgatgctgcgcgttggaacgctgagtggggatcggacaggctgggttgtgtaaaacaccgcatcaaaccggttcgacacgcgcattttgcggtattactagacatcaacgtccctttcgaggtagtatcaaaccggttcgatacgtataagtatgtaaaagcacgcatacactgcgtacacattgcacctgcatccatgaaccaagggaggtcccatgaaaaacaaagtgcagctcatcgcttacgccgatcgtctcggcgatggcactcttagctcgatgaccgacatcctgcgcacccgcttcgacggcgtgtatgacggcgtgcatatcctgccgttcttcactccgttcgatggtgcggatgcaggctttgacccgatcgaccacaccaaagtcgacccgcgtctcggcagctgggacgacgtcgctgaactttccaagacccacggcatcatggtcgatgccatcgtcaaccacatgagctgggaatccaagcagttccaagacgtgcttgaaaaaggtgaggaatccgagtattacccgatgtttctgaccatgagctccgtcttcccgaacggcgccaccgaagaggaactggccggcatctaccgcccgcgcccgggcctgccgttcacccactacaagttcgccggcaagacccgcctggtctgggtcagcttcactccgcagcaggttgatattgacaccgattccgacaagggctgggaatacctcatgtccatcttcgatcagatggccgcatcccacgtcagctacatccgtctcgacgccgtgggctacggcgccaaggaggccggcaccagctgcttcatgacccccaagacctttaagctcatctcacgcctacgcgaggaaggcgtcaagcgaggcctcgaaattctcattgaggtgcatagctactacaagaagcaggttgaaatcgcctccaaggtggaccgcgtctacgacttcgccctgccgccgctgctcctgcactcgctgttcaccggccacgtcgagcccgtcgcccactggaccgacatacgcccgaacaacgccgtcaccgtactcgacacgcacgacggcatcggcgtgatcgacatcggctccgatcagctcgaccgcagcctcaagggcctcgtgcccgacgaggacgtcgataatctggtcaacaccatccacgccaacacccacggcgaatcccaggccgccaccggtgccgccgccagcaacctcgacctctatcaggtcaacagcacgtactactccgcgctcggctgcaacgaccagcactatctggccgcccgcgcagtccagttcttcctgcccggagtgccgcaggtctactacgtgggcgcgctcgccggccgcaacgacatggaactgctgcgcaagaccaacaacggccgtgacatcaatcgccattactactccaccgccgaaatcgacgaaaacctcgagcgcccggtggtgaaggccctgaacgccctggccaagttccgcaacgaactgcctgcattcaatggcgagttcagctacgaagccgacggcgacacatccatcaccttccgctggatcgctgccgacggcaagaccaaggccgccctcatcttcgagcccggccgcggactcggcacggataacaccactccggtcgccagcctcgcctggaccgatgccgccggtgaccacgagactgatgatctgctgagcaacccgccgattgccgatatcgactaaccgttggcccataaacgccactccgctgtgcgcgctccaagtagtgcgtccggcgtaagctgggtccatggaaaacaaaccgcccgcagtgcactgaagctagtgcgctcgggcggttttgcatgtggcggggttgcgggtcatgctcagtcggagctggccggtacctcccgccggtgatgagagcaaagaaagagcagcaacatgttggaaccgtacgtgcgcccgggtattgacgaccgcccggatctcgacaaggccctgagccccgaagacaaggcagccgtagcccgactggccatcaaggaccgtcgtcgcccgcccgaggcatccgccgaccagcccgaggcccaggccgtgcgtctggcggccgccggttcgtcggctgctgccgctgccgcggccagcgtggatgcccctgcgcctgatctgtcgtctgcatatctcgatatgcgcgatccgatggtcgccgccaatggtcagcgacccaccacgggccaggtatcccgtctcaactgggggttcttcgccgcttccattctggtcggcgcaccttggatagcattgaataccatcgccatgcccaacgcggtggctcgtctgttcggctacgacaccgcttctgccatatcggtcaccatcaatccgtccaccagccgtccgctgcccgtcgccactgacttggtggtgcctctggccgtgctggtggtcgttggcgtggtggcctccatgttcgcgatgcccttggtctccgcgctgtccgaccgcacacgtattcctctgggccgccgtaccccgtggatggtggcgggtggcgtgctgtgcgcgctgatcacgctggttctggggcggaacacaggcctcgtagtgctgtgtttcttctgggcgctcatgcagtttgcctatgcgatgatttccgtgccgttggccagcgccatcagcgaacgggttccggacaaattccgtccgcgcattgagcgctggcacggtatcggcgtgatgcttggccaagcgcttggtgtatgcatgggtgcgctcggcgtgatgttcgactccttcacgccgtttgcctacaccgccgtgctgtttgcggtttccggcatcctgaccgtgatcatgctgcccaaggagccttccagccaggagcagccacatcaacgattcgagtcgagccaggtgtttgaccagctgcgtccgccggcacatgcgcctgcattcgcccgtgtgttcgccgctcgcgtgtgcatgatgacgggcgttgggctgaccggggtctttctgtggtatctcgtgcgcttttgggtgtatggcaaggctgtggtgttcacttccgcgccattgaccattcccgcgggcctcctcatcgccggcatggccgcggcaacgctcatcggtgctgcgctcgcgtcctgggccgctgggccgatctccgagaagatcgaggaacggaacatcgccaccactgcagtggtggcggcatcctgcctgctgtatgccatcggcgtggcggtggcatgggggctcggcgtctggtccaccggcaccgcccgtgaaaacggcatgctgctcttcgcgctgatctccggattcgccttcggcgtctacgatgcgttaggccttgaactggtgatggactctttgcccgacccgcgccgagccggccacgacctcggcatttatgcgctcgccaactcggccggtctggcgctcgccgccatcatcggcgcgctactggtgaacgccttcgagcacagcttcggctattacctgctcttcccgtccgccatcgtcatggtgctgctggccggaatcgtcaccctcaccgccgagtccgcgcaatgacgggccggtccggctccccggccgccggcggcgttcctccccgcggcgggggcgttcgtctcggcgacgtggcgtccacaatgtgaacccttgctggattggcaagacagccaaacctatgtttacattccagttcaggtcgaacggcctgaggaaataccgaaaggaggccacgcgatgactggattcaatgcttctgcgtttgtatccgcacgaattattagcccgtcttcgctggcggactaattcggcattgatgcttgaagccccgtcaacgaaggcagggccaatcaagctgacacaatcggtaaggccctgcaagttgcggggctttttttgttgcgctcacaaggcttacggcagaatcccgcagacggaaacggtagcggacagtacacggcaacaacacagcaacagaacaacaacctccctgtgagacgaaataatcgcccgccaatgagagtgaacgagagcaaaacaggagtaacaatgactgcagcagtcgaagagactggcttagggcaggcggcaggtaaagccgctaccttggtacgcgattcggtcaagaccgtgatcgccgcatcgatggtcggtaccgccatcgaattctatgacttctacgcctacggcaccgccgcggcaaactacttcccgcacatcttcttctccgcgaaggacaaccccaccgtcgcactgctgatgagcttgctgaccttcgccatcgccttcatcgcccgcccgctgggctcgctgatcttcggccacttcggtgaccgcatgggccgcaagaccacgctggtcgtcagcctgatgaccatgggtgtcggcaccttcctgattggctgcctgcccacctacgatcaggtcggcgttggcgcagtcgccatcctctgcctgctgcgcttcatccagggcatcggcctgggcggcgaatggtccggcgcggcactggtcgccaccgagaacgcgcctgaagacaagcgcgcactgtacggctccttcccggagctcggtgccccgatcggcttcttcctgtccaacggcacctacttcgtgctcgaatccttcaacaatcaggacgcgatgctggcttggggctggcgtgtgccgttcctgctgtccgccatcctggtgatcgtcggcctcgtggttcgcgttcacatggaggagaccccgatcttccgtatggctcaggagcagaagaaggtcgtcaagtccccgctgaccgaggtcttccgcaagtcttggcgtcaggtgctgcaggccaccttcctcgtggccgtgacctacacgctgttctacacgctcgccacctggtccctcgcttggggcaccaaggagcagggcgaaggcggcggcggccttggcttcaccaaccaggaatacctgctcatgctcatgatctccatctgcgtgttcgccctgttcatcgtgctgtcctgcctgtacgcggacaagatcggccgcaagcgcgtgctgaccttctcctcctgcgcactcgtcgtgttcgccgcgctcttcccgttcctgctggacggacaggtcgtcggccagcacaacttcttcgccaacatggtgttcctgtgcgttggcttcgccctgatgggcgtcgccttcggcccgatcggcgcgttcctgcctgaactgttcgaggcgaacgtgcgctactccgggtccggcatcggctacaacctggccgccatcgtcggtgcggcgttcgtgccgaccatcgccacttggctgagctcccattggggcgttcactccgtgggcctctacctcgccgtgatggccgtgtgctgcctggtgtcggtcctgacctgccgcgagacgaaggacgctgactttaccaagtgaaatcctccataactaaatatcgccaagttcacaacgtgaaaaatctcaattccacgaagtgaacccctgcgaggcttttccggtgcaacaggactaaacctgcatatcggaaaagcccacaaggaaagccacaacagaatatcgctcagcgaaaccccgcagagcacaagaaaatttcaacccccataaacaaataaataaaaggagcgccaaaaatggcagcaactatctggtacgagaaggacgccgatctgtccgtgttcgatggcaagaaggtcgccatcttgggctacggctctcagggtcacgctcacgcactgaacctgcgtgactccggtgtcgacgtggtcgtcggcctgcgtccgacctccaagtcggtcgagttcgccaaggagcagggtcttgaggtcaagccggttggcgaggccgtcgccgaggctgacgttgtgatgatccttctgcctgaccagtaccaggccaaggtctacaaggaagaagttgagccgaacctgaagccgggcgctgccctggcgttcgcccacggcttcaacatccactacggctacatcaagccgtccgaggatcacccggtcttcatggtcgccccgaagggcccgggccacatcgttcgtcgtgagtacgccgctggccgtggcgtcccggtcgtcgttgccgtcgagcaggacccggacggcaagacctggccgctgtgcctggcttacgccaaggctctgggcgctctgcgtgcaggcgccatcaagaccaccttcaccgaggagaccgagaccgatctgttcggtgagcaggacgtcctcatgggtggcatcaaccacctgtgcgacctcggtttcgacgtgctgaccgaggctggctaccagccggagatcgcctacttcgaggtcttccacgagctgaagatgctcgtcgacctggctaacgagggtggcctgaacaaggctcgctggtcctgctccgacaccgctcagtacggcgactacacctccaccgtcatcaccgacgagaccaagaagcgcatgcagtaccagctcaagcgcattcaggacggctccttcgccaaggagttcatggacgaccaggccgctggcgccccgaagttcaagaagctgcaggaagagtactctcacccgcacctcgagaccgtcggcccgaagctgcgcgccatgttctcctggaacaacgccgaggccaaggacaaggacgagaccgagtccttcaacggcaagatcgctcgtacccaggttcagtgattgccgcccctgaaggggatttaagctagcaaaccgccgttcccgcccatacgggagcggcggttttgtgttgttgcgcgcagcgaatcattctcaataacaactatgcgctgatttcttgcaggcaaacgaacaccgaatatgcaagatcgttgatatctcagcttttccccatatgtgggattgtgcgattctgttcaaaagggtgcagagttgttatcgagaatcgttctctgcacacggctgtccatactccaatagtgacctagctcacgttgtggactccagcggggctgcgacggcgttctcggtaggattgatttcggtttgaaggacacaatcctcgcaacacaggacttatctgcacaccgtagataccccggcgcccagcggcgccacaccccactactgaaaaggagtgccaataatggcagcacagatctggtatgagaacgacggtgatctttccgtcctcgaaggcaagaaggtcgcaatcatcggctacggctcccagggccacgcccacgcgctgaacctgcgcgattccggtgtcgacgtggtcgtcggcctgcgtccgacctccaagtcggtcgacttcgccaaggagcagggcctcgaggtcaagtccgtggccgaggcttccgccgaggccgacgtgatcatgatcctggcccccgaccagtaccagcgcaccatctgggccaacgacatcgagcccaacatcaagccgggtgctgctgttgcgttcgcccacggcttcaacattcactacggctacatcaagcccaccgaggatcacccggtgttcatggttgccccgaagggcccgggtcacatcgttcgtcgtgagtacgccgctggccgtggcgtcccggtcgtcgtggccgtcgagcaggacccgcgcggtgacggctgggccctgaccctcgcctacgccaaggccctcggtgctctgcgcgccggtgccatcaagaccaccttcaaggaagagaccgagaccgatctcttcggcgagcagaacgtgctcatgggcggtgtgaacaagctcgtcgagatgggcttcgaagtcctgaccgacgccggctaccagccggagatcgcctacttcgaggtctgccacgagctcaagatgctcgtcgatctgatgaacgagggcggcctgaacaaggctcgttgg

SEQ ID NO: 3062 - DNA, 15855 bp, Unknown
  R19_24m  MAG No. k141_28030
agccccgggcgagaaggtgctcctgcacggcaagcagtacaagctgtaccgtggcatgggctccctcggcgccatggccccgcgcggcaagaagtcctactccaaggaccgctacttccaggccgacgtgacctccagcgacaaggtcgtgccggaaggcgtggaaggcgaagtgccgtaccgcggcccgctgaacgccgtgctctaccagatgctcggtggcctgcaccagtccatgttctacatcggcgcccacaacatcgccgagatgccggagcgtggcaagttcatccgcatcaccgacgccggtctgcgcgaatcgcacccgcacgatatcgtgatgaccgccgaagccccgaactactccggcttccacaacaactgatcggttgatgcccgctagcttgcgctagttaggggttgattccttgtgaaaagggtctgcttatgcaggcccttttcgcgtatgtggctcgagatagcttgtatgcgctggggtatagtctgaactgttctgcataagcgatgaccagcgaagaaaagaggcacaccatggtcgacagccatgacgcggaaacgtacagcgcgaaggactcgcgcctgatttggatcgattgcgagatgaccggacttgacatcttcggcggcgacgaactcgtcgaggtgtctgtggttcccaccgactttgacctgaatgtgctggacgagggcgtggattacgtcatcaagccgtccgagaaggctgtgaaccacatgaacgatttcgtgcgccagatgcacacccgttccggcctgatcaacgagtgggagaatggcctgagcctggccgaggccgagcagaaggtcaccgaatacgtgctgcgcttcacgccggaaggcgtgcgcccgctgctggccggcaacaccatcggctccgacaagaagttcctcgaccactacatgccgggcctcatgagccacctgcattaccgcagcgtggacgtgagcaccttgaaggagctcgcccgccgctggtacccggccgtctacgagaaccgtccgccgaagaacggcggccaccgtgccctcgccgacatcatcgagtccttggacgagttgcgctactaccgtaaggccttcatggcccccgtccccggcccggatgatgccgcctccaaggccatcgccgccgacatcgtggccaccagcattctcaataagtagtccgccgtacttggctcccctccctgaggggagtctagagaggttgatatgcgccaaaccgaagccctagccattctgaacgccggcgcgaacgtgtttctgaccggtgcgcccggtgccggtaagacctatgtcttgaacgagttcatccgccaggctcgggccgacggcgccagcgtggcagtcaccgcgtccacaggcatcgcctccacgcatatcaacggccaaaccatccattcgtggagcggcatcggcgtggccaccgccctgagcccgagtctgctcaaactcatcaaatcccggcgcaaacgtaagattcaggctacggacatcctcgtcatcgacgaggtctccatgctgcacgcatggctgttcgacatggtagaccaagtctgccgcgaagtgcgtcgcgacccacgcccgttcggaggcatccaggtcgtgctgtccggcgacttcttccaactgccgccggtttcggtgtccgggcgcaaccgcgacctcatcgcccccacccccgaattcatcgccagtcgcgaacggtatgcccgtgccggcttgaaccccgaaggcttcatcaccgaatcgctggtatggcccgaactcaacccggtaatctgctatctgaccgaacagcaccgtcaggacaccggcgaactgctgaccgtgctcaccgacattcgcgaaggcgacgtgacccagtccgaccgtgacgtgctcgtcacccgtctgggcaaactgcccgagcccggccaggtcgccgtccacctattcccggtgaaccggcaggccgacaatctcaacgacatgcgcctgaaccagatcatgcttgagccgcacgagttccacgccgagacagcaggccctgccaacctggtcgaccgactcaagaagaacatgttggcccccgagcgactggtactcaaggaaggcgcggctgtcatggccctgcgcaacgacaccgatcgccagtacgtcaacggctcgctcggcaccgtgcgcggcttcgcgcaggagaacaagggcggctggccgatcgtggaattcgaaaacggcaacatcgtcaccatgaaacaggccacatgggaaatgatggacggcgacaccgtgctcgcctccgtctcgcaggtgccgttgcgttgcgcgtggggcatcaccatccacaagtcgcaaggcatgacgcttgaccgtgcggtcatggatctgaagcgcaccttcgcgccgggcatgggatatgtggcgttgtcccgcgtcgaatcgctgggcggactgtatttggctggcgtcaacgaacgcatgttcctcgtctcgcccgatgccgtggtgctcgacggcgacctgcgcgaagcctcggcctcggcttccgaccagttggccgatgaaggtgcaagcgcgttcaaacccgccgagccggacgaattcggtgccaatcccgatgatgacttcgcccaggacgcgttattctgacggtcgatatatcgaacgaccgctaatttgagtgtttctgcacttcgaggggcggattttgagttttcgggacatctacttccgtttcaaggggctgatgtccaagtagacaacgcttaaaaacggcggaatgacgttggtatgaagccgtttctatgtgcgattgagcggatgaccagcccctcgaaatgcaagtagatgtctccaagaggcggaatcggccccttgaagccgaagaagacactgcgaacttgtcttcattgaggaactgaacggctaccatggaataagaggtggtagttatggtgctatccgagatatttcgtggaaacaatgaggttcgcgaggccgcccgggccggtgtgcaaatcgatacggttagtgtggctagtgcgtcagatgcagcaagcgcggcagacggcagcggcaaaatcactggcgcaatacgtccgccagcggtggctggttcgttctaccccgctgaccgcacaacgctcaagcaactcattacccatcaattggattacagtcgagaggttctgcaacagttggagcccacgcttccagcgggagtgccaaaggctgtaatcgtgccgcatgccggttatgtgtattccggcacggcggccgcgcttgcctatgctttgctcgaacgagggcgggggagtgtgactcgcgcggtaatcgtgggaccgactcaccgtgtggccgtgcgaggcgtcgcctgttccacggcagcggcgtttgaaacgccgctgggcactgtgccggtagacattgcagccgagcgtaaggctctgggcctgtctgtcaatgagccattgcgctccggtacacatgcccgtccgggcgcgtcggctcccgcaatgatcgtcaatggcccaacccacgcacaagaacatgcggtagaagtgcagattccgttcctgcaaaccgtgctcggcccagacctcactattgtgccgttgaacgccggcgatgccacgccacaagaggcgggtgatgtgttgcgtgctttgtggggtggcccggaaaccgtcatcgtgattagttcggatctctcgcactatcatccgcacgaagtcgcccgcgcgttggatgaccagaccattgcggacattgcggctttgcatctgccgattcaccctcgccgggcctgtggcgcatacccgatcaacggccttctggatgtgctaaaaggccgcaaggacatgaagctcttcgagctcggctgttccacttccggcgacgacggcgtggtggcgcttgccggccaacctcgccccgcaatgcgagacgccgacgagccggtagtgggatatgtctcgtttgccgcgtgggaatccaaaccagaagcagatgctccagccggtgcagatgacttaggcgaatcgggaacagcccatggtgatgtgctgctgaaactcgcccgtgccgctatccgggaacggttgcatatcgagcatccgaccgccgctgattcgaccgcgtccattcttgccgcaaacccatggctgaacgagtccggtgcctgtttcgttaccctgaccgagggtggccggctacgcgggtgcatcggttcgctggccgcccaccgctcgctcggcaaggacatagctgcacatgcggtggacgccgccacccgtgacccacgtttcaacccggtcaccgccgcggaatacccgttactcaatgtggaggtatccgtcttgggcgagcccgagccgattaccgtgaactcctgtgacgccgattcgcgcgataccggctcgaagaccgcgactctggcatcgctgcaatccggacctcagaccgacgccgtcaaacgggacggcagcaacgtcgaacgcccggtacgttcgcgcactgaacttgaggaagtattacgccccggcaaagacggtctgattctcgccgaccgtcgtggctgcagcgccacattcctgccacaagtgtgggatgagctgcccaatccgcgcgatttcgtcgctcacctgctcgccaaggccggtatccgcccgtcctacgactggaacgatggcgaaattgactgtcaacgctacgaggtgaccgcctatgccgagcactaacgcagcaaccatgtcccctcccgctggcgggaggtggcgcgaagcgacggagggtggtcaccgagaatcagagggtggtcaccgggaatcgtgcggtcatacggcgtcagtcacagatgttcgtaaccccgccatagcccgctggcaaacgcaattccacgacggtaccaaccgcgctcgctgcgaactatgcccgcgccgctgcgtcctcaagcccggccaacgcggcttttgcttcgtccgctcaaaccacgacggactcatcgtctccgacacctacggccgcagctccggcttcgccgtggacccagtggaaaagaagccgctcaaccacttccaccccggttccagcgtgctgagttttggcacggctggctgcaattccggttgccgattctgccagaattgggatattgccaaagcccgcagtttcgaccggctcggcgtggaagccagtccggagaaaatcgcgcaggtcgcggccgaccggggcatcgattcggtggcgttcacctataacgatccgatcgtgttcgccgaatatgccatcgacacggccgaagcctgccgagcgctcggcattcatcccatcgccgtgactgccggatacatgagcgccgaagcctggcccgacttctacgccgccatggacgccgccaacatcgatctcaaaggcttcaccgaagaattttattggaaagtgaccggcacgcatctggccgatgtgctcgaaaccatcgactatgcggtcaacgaggcacgcacaccagaaggcgaacacgtgtgggtggagctcaccacgctactcatccctggactcaacgatgacgacgcccagctgcatgctgaatgtacatggatacgcgagcacttgggcccggacgtgccgctgcacttttccgcattccactccagttaccgcatgatggacgtaacgcccaccccgcacgagactctgacccgcgcccgaggcatcgccctcgaagagggactcaattatgtgtacaccggcaacgtgcatgatcgtgaaggcgataccacatattgcccaaaccctgaatgcagggccaagctcgtggaacgcgattggtatcgaatcattgccaaccgtttatctgccggatacagtggcaatgggcactgccccgtatgcaggactgctatcgccggacgttggtaatctgcctcaggtcgcccgcgcgatttagcgcagatcgccaatacgcgcggcgatcgtcctcattgatttgaggctcgcctcatagcgcgcggctgccacaatcagaatgatgccgcccaaagcaagccacacccaccggtagtggcgggagaattcggcccgccatggccacagcacagtcaccgtgctgacgataagaatcaccgtgccgtagatcaacggtgcttgcagcaaacgcacacccacaatcagcgcggccgctccggacaggccgcttgttccgggaccgacataggcgattgcgcaaatggtggcatggccattggctgttgcgataccggttgtcgcggaactgccgttgggaattgcggggttgcagcagaaaattgcggggcccatgctgggccggttgatacaccggttgctccgcgggttccggctgattcccctgttgctcggtcggctgcgtcatcgtgccctcctacccttctagccatcattgttgtacgaatgagtccgaatgccaagatgaaggccggaatagtgcgaatagcaggcgggcttgtcggttcacgcgaatatcttggaacacatgacttccaatacccttcgtatgtcaaccatgttcctgcgcaccctgcgcgaggaccccgctgatgccgatgtcgattcggccaagctgctgcagcgcgccggctatatccgcaaggccgcacccggtatctggacctggctgccgctcggtctgcgcgtgctgaacaagatcgaggccatcatccgcgaggagatcaacggcatcggcgcccaggaagtgcacttcccggccctgctgccgcgcgaaccctacgaggccacccatcgctgggaggagtacggcgacaacatcttccgtttgaaggatcgccacgaggccgattacctgctggcccccacccacgaggagatgttcacccttctggtcaaggacatgtactcctcttacaaagacctgcccgtcaccctgtaccagatccagaccaagtaccgcgacgagttccgtccgcgtgccggcctgatccgtggtcgtgaattcatcatgaaggacgcctactccttcaccatcgatgaagaaggcatgcgcaaggcctactatgacgagcgcggcgcctacgagcgtatcttccagcgcctcgacctgaagtacgtacctgtgttcgccatgtccggcccgatgggcggctccgcatccgaggaattcctggctccgatgccgatcggcgaagataccttcgcactggcaccttccggcaaggcatggaatgtggaggccctgagcactccggagctgccggaaatcgatgcttccgccactcccgccgcttccaaggaagccaccccggatgccaagaccatcgataacatgatcgagcgtgccaacgccgaccacccgcgtactgatggccgtgaatggcaggcttccgacatcctcaagaacgtggtgattaccgtcaagcaccctgaggatgaagagcatgacgagccgtggcgtgaagtgattgtcgtcggcgtgcccggcgaccgtacggtggatatgaagcgactggaagcccagttcgctcccgccgagcttgaggaggccactgaagaagacctgaagcagcaccccgaactggtgccaggctacatcggaccgatggtgcttggcccgcaggccgaggctgctggcgtgaagaacccggttcgctacctggtcgacgcgcacgtggtcaagggttccgcttggttcactggtgccgatgagaacgaggtcgactactacaacctggtgtacggccgtgacttcaaggccgacggcgtggtggaagccgttgaggttcgccacggcgacatgagcccggacggttccggtccgttgagcttcgagcgtggtgtggaaatcggccaggtgttccagctgggtctcaagtactccaaggcactggacctgaaggtgctcgaccagaacggcaaggccgtgccggtgtggatgggctgctatggcatcggtgtttcccgcgtgctggcctgcatcgccgaaacacaccacgacgaagccggcttggcttggccgtccgtgattgccccggctgccgtgcacgtggtggccaccggtaaggacgccgtggcgtttgaaggtgccgagaagctggtcgccgagcttgaggccaagggccttgaggttatttacgatgaccgcaagaaggtgtctccgggcgtcaagttcaaggatgccgagctgatcggcgtgccgctggtcgccgtggtcggccgcgattacgtcaacgacggcaccatcgaactgcgcgaccgcaacggcgaaaacaaggtcgccgtgcccgccgccgaagccgccgacgcgctcgccgagcgcttcgccgccctcagctgagtcccacttactcagcctcggcgttaatcgcatcaagcgccattctgcccagtcgcagaatggcgctttgttgtggataaccgaaacttatccacattcttaaaatttcaactgcgtcacagtatccacatttgccagttgcccttgtgcacttcaaacgtcatgcctcacagtggaggtaccgctggggcgtgcaagccggcaatgaagccggagacaggctccggcggtccacatccaaacaacaggccagcaggccgaggaaaggaccgatcatggcaaatcaacaagcagcagtgaccgtcaccggctttgtggccggtgatccgacactaggcggaactgagagtttccgcgtgctgacattccgtatgggcagcacgcgcagtcgactcaacccgactaccagacaatgggaggattacggaaccgcatgggtgggcgtcaaagcgttccgtgctttggccgtgaacgccgccagttcagttcgccgcggtgaccgcatcattgtggtcggttcactcatcaccgagcagtggaccaatgagcaaggcgaaccgcgcagtagaaccgttctcgaagccaccaacattgggcatgacctgaccttcggcaccacgtcgctgatcaagccacagcgtgccggtaatggtaacggaggcaatggtggcaacggtaacggcaatgccaatggtgccgccgaaggcatggatggcggaaacgggcaacgagcatcgtcgccgtacgttaggccaatgcaatatggcgcgggcggtgccgcatccggtgtgggtatggacccgtatgcgacctcgtcggaatctggccccgtcgaatttggggtcacctccgattccggccaatcgccgtcgccatcaaccgagtcagcggctgcgtccatggccgatgccgtcatgtcgcaaccggacgctggcgctaatcagccacagtccgcagcccaacaaacctacgtcgacggtttcgccgaatcttccgatcccagcgaatccgaattctgagtgccaaccatacatcatgaaaaaccgctgtgttcgcctgtaatcgaggcaagcacagcggttttctcttacataacggggattaccaaatgctcacacggtccttgggcgcgagccacatggcgtcgccttcggtcacgccaaaggcatcgtagaagaggtccacgttgctggcgatgccgttggtgcggaattcggctggagaatgcgggtcgatctgcaggtactgttcggccagctcgtcgcggttcttggtgcgccagatggaggcgtagctcaggaagaagcgctgcaggccggtgaatccgtccatttcgggggcggtatcgagcagtgccttgatggcggcgggggagccgtcttcttcggcgtcgggcttacctgccgccttgccgagcgcgaatgcatacgccttgagcgcgatgttcacgccgcccaaatcgccgatgttctcgccgatggtcagcgcgccgttcacgtgcggcgccttatcaggctcgtcagcgtatttctctgccagctgcagcggcacaaagctgttgtactgggcgatcaatgcgccggtgcgggcctcgaagttcttgcgatcctcgtcggtccaccagttgttgagcttgccgtcgccgtcgtactgcgaaccctgatcgtcgaagccatggccgatctcgtgtccgatcactgcgccgatgccgccataattcgccgcatcctcggccttcgggtcgaagaacgggggctgcagaatcgcggccgggaacacgatgacgttcatgctcggctcgtagtaggcgttcaccgtctgcggattcatcagccattcgtccttgtcgaccgccttgccgaccttggccagctggtagccggtctcgtacaggttcgcggccttggcgttctcggcgggcagcgcatccgcggagacactcagcgccgaataatcgcgccagtggttggtgtagccgatcttcggcgtgaacttggagatcttctccagagccttggccttggtgtcttcgcccagccaatcggaattggtgatggacacgcggtaggcgtcaatcagattggcgaccagctcttccatgcggcgcttcgagctttcggggaagtgcaggcgcacatactcgcggcccacatcttcaccgcagacgccgttgaccaggctcaccgcgcgcttccaacgatcgcgctgcttcttggcaccggagagcaccttgccgtagaagtcaaagttggtggtgtcgaagtcgcgagacagggaggaggcgaagcccagaatcatgtgaacacgggcccacagcttaaggtcggccagatcggcctcggcccagaacgcatcaagaccagtgaggaagctcggctcgtgcacaatgacgcgcgcgaacacagacttgaaatcgatcggctgagccttggcggcctcggtggcgtcataggcggtctgccaggcgtcgatccaggaaccgagatcgaagttcttcagcgtggcggccaaatcggcgtaatcggtggggttgtaggtcttcaccgaatcgcgcgtggccacattgtcccaatgattggcggcgatcttggtttccacggcaaggaagtgtcgggccatatcaagtgcggcttcgctgggaaccgtggtgggagcattgctctcgtcatcgccggtgttggccggcagttcatcgccaccgttggattcggcggcgggcgcgtacccggcgttcaccagctgggtggcgaccatcgccacgtatgcttcgcgcacggggacgtagtggtcctcacgatagtaggcttcgtccggcaggcaaaggccggcctgctcaaggtgggcgatattgcggtccgggtcgccggggtcgccgtaaacggccaagccgaacaggtcggggccgccggctgggttgatggtgccgagcacgcgcgtgagagcggccttgtcgatggcggaatcgatgaggtcaagctcatcgcggatcgggtcaaggccggcggcctcgatggcgtcggtgttcaggaacgaatgatacagagcctgcgatttggtggccgggcagtcgtcggcgtcgaggatgtcgcgcacttggttttcggcgtcttcggcgagcttgtcgaaggagccgtagcgcgaacgatcgtcgggtaggcggtaggtgtcgatccatggaccattcacgtagcggaacaggtcattggtcggcttgatgacggaggagaacgatgccgggtcgatgcccgacgtcagcgtttcggtttcgttggtcatggccctaagcctaatcgcggcgggggagaagcgttggtgatgcagatattgcgttatgggtattgcgctgtcagtgaactagacggattgcctaactgtagtgatggttcaaattaggtaacttgcctaacatggtatgtggaacctgaatatggaccttgagttaaggagttacgatgagcaatccaaacgagggtcagtggaatggccagacgggccagcccaaccagagccagccgagccagccgaatccggcgggccaaccgggccaaccgcagtatggcgcgtatgacagcaatcatggcggccaatatcctccgcaaggtgcgcagggagcgcaagacactcagaatcagcaggcgcagaacggccagccacaaggcggaccgaaccagaacccgtactacggcccgtacgcctacaatccgaactacggcccgaacggccagccggcatggggcccggacggtcggcggtatcaggcggacggccaatcgaatagccaagcggacgggcagccgaatggtccatggggcgatcaaagtcaacctggctggcagcagaccaactggtatgtcggcaatttcagtccattccgcctgatcgaggaatggctgccggaaaaggccaagaccaagattcgcatcatttacggcgtggtgggcgtggccgccatcgccttgggcgctgcgctgttgctggtgccgaacaagacgctggctttggccgcattgttgctcggcgtgtatttcgtgatttccggcgtggtgcgcatcgtcagcgctcttgtagagccgggtctgccgggcggttggcgtgtgctggacgtgttcgtcggcattctgctgaccttcggaggcgtcgtagtcgtacgaaactacggtatgaccggtcagaccttggcattactcatcaccctgatggtcggtttcggttggattatggaaggcgtgatggctctagtcgaatcatggcgcatcccgcgctccggctgggccatcgcctatgccatcatctcgattatcgccggcttcgtggtgctgatgagcccgctgagctccgccgtattcatgattatcttcggcggatacgccatggtggtgatggggattacttcagtgattcgcgcgttcacttttggcaagcgcaggaagtgatctcgcgctccagacaatcaatctccggacaatcaatccaaagcgcccgtgcaggttatgtatctgccgggcgctttttctcggccttggccgttgataggctactagcggaccctaggcagaccacgggtgatgctctggcggttgaccccgggctgggctagagttgagaacaagtctcaacaaggtagaaagaacctcatgatcgaattgaagacccctcgtgaaatcgaggagatgaagccggccggccgtttcgtcggcggcattctgaaggaactgcaggagaccaccaaggtgggcaccaatctgctcgaaatcgacgagttcgtccacaagaagatcgtggaccgcaagggcgccgaatcctgctatgttgactacgctcctgacttcggcaccggcccgttcgcccactacatctgcacctccgtcaacgacgccgtgctgcacggtgtgccgtacgattacagcctgaaggacggcgacctcgtctccctcgatctcgccatctccgtggctggctgggtggccgcttccgccgtcagcttcgtggtcggcaaagacccggaccccgaagacctgcgcatcatcaagtgcactgaggaagcgctcgccgccgccatcgacgtggccaagcccggcaaccgtctcggcgacatctccaacaccattggcgacatcgcgcgcgaatacggctacccgatcaacctcgagttcggcggtcacggcgtgggccacatcatgcacggcgacccgcacgtaccgaacgacggccgcgcccaccacggctacaagctgcgcgaaggcctggtcatcgccatcgaaccatggttcctcaagaccaccgacgagatcttccaggatccgaaggacggctggaccctgcgtgcctccgacggctcgcgcggtgcccactccgagcacaccatcgccatcaccgagaacggcccgatcatcttcaccgatcgcaccaacctctgattggcgtttggcgtatggcgggtgtctgattggcctgtgatgggcgatcggtatctcatcaaccgtctatatgttcgcggttttcccgtgaattcgagacgtaacaagccgaagtgcgtttgctttgatagcatgagcgcacttcggctttcgtgtatcgaccggtgtctgccggcggtaacacagaagacataaagtaccgaacactagcgttcgcgaacgcgtgaacgttaatgtttggggtaagtggttcatgaagaggaaggtgcgcgaatggcaacggcacaacttgatgtcgattcgaacaagttcaacctgcccgtggtgaaggctagtgcagggccggatggcatcgtcgtttccaagctgcgcaatgacggctgggtaacgctcgaccccggattcctcaccaccgcacagtgtgaatcgaaaatcacctacatcgacggcaagcattcgatcctgcgctaccgtggctaccccatcgagcagttgtgcgagaactccgattttctggaagtggcgtggctgctgcgccacggcgagctgccgagcagggctgagtatgagcagttctgcgcggacatcaaccacaagacgatggttggcgaagacttccgtaccttcatgggttcgttcccgcgctccgctcatccgatgagcgtgcttgcctccgccatcaatgcgctggccacgttctatccggacaccaccgatatctccgacaccgaccagctcgatgaggccgccaagatcatcatggccaaggcccgcacgattgtgtcgtacatctttcgccgtcgtcgcgatgagccgatgctgtaccccgattacgcgcgtggctatgtggacgacttcctgcgcatgtgcttcgctgtgccgtacgagccgttcgaatctgacccgttgtatgtgcatgctttgggccgtttgctgattattcacgccgatcacgagcagaactgctcgacctcggtggtgcgtatcgccggttccgcccacgccaatctgtattcggcggtggccgctggcgtcaatgccctgtccggaccgttacacggtggcgcgaatgaggccgtactgcgccagctgaaggcgattcgtgattccggcaagtctgtggccgagttcgtgacggatgccaaggagaatggccagaagatctccggccttggtcaccgtgtgtataagtcatatgatccgcgtgcggcgattgccaagaagtatcttgagaagatcatggagcgcgaggatacgcagaaactgccgtccgacgagcgtgcgttgttcgatgtggccaccgagcttgaggatattgcgttgaacgacgagtatttcgtatcgcgcaacctgtatccgaacgtcgatttctacacgggcttgatttatcgggcgatcggcttcgatccggccatgttcaccacgctgttcgcactgggccgcattcctggttggattgcgcagtaccgtgagatgctggccgacccgaacaccaagatcggccgcccgcgccaggtctacaccggtccggtcgagcgcgatttcgtgccgatggacgagcggtgattgttggtttgagaaagcgcctcgctggagatccagtgaggcgctttctatatgtacagcgcaaaccagctatgctgcgacggctgcataagaacgagcagggctagttctgaaattgaaataatgtgtgcgatatcgaagcgcaccgagggaaggcgtacggaagtacgtcgaccgaggagcaggaagataacgctccgttatttcaatttcagttcttgtgcagcttggcgttgagctcaattcccaccttgcggtagcgggcttcgatacgtccattcaccgagttgcggatgaacaggatgttgtctttgccggagagctcagcacccttgacgacttcgagcggctcgccggctgcggccttggccttgtcccagatgctgatcttggtgccggcggtgatgtacagaccggcttcgacggtgcagttatcgccgagggagatgccgataccggcgttggcgccgagcagcgagtgctcgccgatggagttgcgcagcttgccgccgccggagagggtgc

SEQ ID NO: 3063 - DNA, 4361 bp, Unknown
  R19_24m  MAG No. k141_28036
aaacgtcgttgcccgagtagctcagtggatagagcaccgctctcctaaagcgggtgtcgtcggttcgaatccgatctcgggcacttggcttcggaaacatgacggtatctcagcctctattcatcggtgatgagccataggcattaggcatgtgtaaacgtataggttccaccatccatcatcccgtcatgtgaaactatgcaaagacatgtggggcttcacggttatcgtgagggtccatggctatcgaatacacggaagagaagcggtttactgtcgaacaggttgaggcgctgttcaagtcggttggttgggaatcggcgcagtggcccgaacggttgttcaaggcattgcagcattcggatacggtaatcagcgcatgggatggcggctatttggtcggcttggttcgcgtgctcgacgatacgggagggggcgaaagtggcggagtgtgctgatcgggggcaacgtacgtagtcattgacggttatcccgtagtaatgttcacgatacgaccccttgtccatacagtgaaaataacggctggcgtccgacgttgctgcgctatgactagagaccatgagtgaagacaaacagtatgacttctatgtggccggtccgttcttcgatcctgagcaaacggcaagtatggaacgtttggaaaagatactggaagatcatggcaaggtattgttcaagccgcggtttgtcagccagatcgaagaagtcggccctgaaggatgttttgcggatgatatccatggcattaatgctgctaaagccgtggtcgccaatcttatggacgaggacccgggcacgatgttcgaaatcggatatgcgcatgcgctgggaatcccggtgtacggctatttcgaaaaccttacgccaatggatcgtgtcaatctgatgattgcgcaagcggtcgaactggtgttcgtcggtcctgatgatgtggcgaaatacttggaaaccggcgaacatacggaagtcgattacattcagttctaagcagctctaacaggttctcagcaaacaggggtggcggcgttctcgtacatagtcatgtacgggaacgccgcagtggtatagggatattccaacaagcggcataatggagtcgtgggaaaaccagtcggatacaagtgaagtgtctgaatttcgtaaggagtgccgttatgagtaaccacaatcccatgaatattgccaccgactttgccaaggccacgggaggaaccgctcgcaaagttgttgctttgaccgataaaggtccgttgaatggctttaagaaattcctgtcgcgcggatcgatgattgatatggcggtaggtgtggtgatgggctctgccgttaccgctgtggtcaattccatcgtcgacaatctcatcagtccattaatcggcatgattggcggcgtaccggatctttccggactgctgaccatcacgttcaacaactcgactgtttcatttggtgcgattcttaacgcgctgattagcttcctgcttgttggcgtggcggtgtatttttgtgtgattttgccgattaataagcttcgtgatctcactgctgcccaggatgaggctgacgctgaagaacaggggcctagcgttgaagagcagactctcgccacgctgcaggagattcgcgacgagctgaaaaaggccaatgactccgccgagtaatctgctgaatgtacggtgcgacagatttacctggtttgcccgaaataacggattgccggggccatttggtctggacaatccgttgtttcgcgcgtgttttgtagcatccgtggagttacatggggagtatgactgaaaacatcgctgataaggccataaacgatactcgtatcgtcaagcagttcaccaatcccgtcaaggagccgattgacagcgacatcaacctgttcgatttgctcgatgagcgagccaagcgcgatcccgatggcgccatgatcgaatataaaactgaggatggcacctggcggccgtacagcgcccaggtcttccgcgacatggtcatcgatctggccaaaggcctgattggtctgggcgtcaacaagggcgactccgtggccatcgtgtctcgcacgcgttgggagtggaccgctctggatatggcgatcatgtccatcggcgcactcaccgtgccggtatatgagaccaactccgccagccaggtcagctggattttcaacgattccaaggtcacgctcgccatcgccgaggatgacggtcagcgcgacaagattgaatccgtgcgcagcgaggtgcccaccctgcgcaacgtgttcgtcatcgaagcaggcggcctgaacgccatcaagacctatggcgaaagcgtcaccgatgccgaattctgggaatacaagagcgcctcccacggcgacgaccgcgccaccatcgtttacacgtccggctccaccggcaccccgaaaggcgtggagctcacccaccgcaacttcgcgttcctggtgcgctccggcctgcagtacatgcctcgtgccggcgcatggcccaaccgccgtctgctgctgttcctgcccctgagccatgtgttcgcccgattcctggaattcttcagttttggcggcaccatttctctggccctgagctccaatatgaagaccatggtcaaggacttcgagaccttcggccccacgctgctgcttgccgtgccgcgtgtgtacgaaaaggtctacaacgccgcctcccagcgtgccggcagcggttttgcgggcaagatgttcatgcgtgccgccgaaaacgcgcgcgaatggtccaaggccgagcagaagggcgagaagctgccgcttcccggtcgtattgctcacgctttctacgagcaggtggtgtacaagaagattcgtaccatctttggcccgaacgccgactttgccgtcaccggtggagccccgatggattccgagctctcccacttcttcaacggcatcggcatgccggtgctggaaggctacggcatgacggaaacctgtggtccggtgtgcgtgagcttgccggaagacaatcgcatcggcaccatcggcatgccgatgtgcggcatcaccgccggcatcgccgaggatggcgagctggtgatcaagggaccgctggtgtgcaaggggtaccacaacaaccctgaggtcaccacccagcagatcaccgatggctggctgcacaccggtgatttgggcgatatctccgaagacggattcatttccatcactggccgtaagaaggacctcatcatcaccgccggcggcaagaacgtgtcgccgggtctgcttgaggcttccgtgatgacctcgcccgtggtcaaccagtgcttggttattggcgataagaagccgttcgtggccgctctggtcacgctggatctggcggatgccaacaactggttggaatcccaaggcgccaaaccggaacccgatctggcctcgctggccaagaacgccatcgttcatgccgaggtagagcgtgcggtgaacgccgccaacgagggcgtttcccgcgccgagtcgattcgtaagttcgagattctgccagacgaattcaccgaggccaacggcatgctgaccccgagcctgaagacccgtcgcgcgcaaatcgttgagcactatcgcgagctcattgacgacgtgatctacgtgccgttgaagaagtagctatcaactccctctgatccaaaaaataagctctctctgacgagggagctgtcagccgcaggctgactgggagagaccgcggctagcccgcgaaacaacaaggccgggtgcgacttgcacccggcctcagcttattcagtccaaaatcgccgaaacataatcggcggcggcctgatccagctccgcatcgctgatggtggcggtgccctgcaccaggaatggttcggcatagttcatgcctaccttgtaggccacgactgcgaatgggcttagcagctcctccatggtgtggttgtactcgccatccttgcggtacttggaggcgtcggaaccagtggtgaccaccagcttgagctccttgcccttgagtgcgtggcctccaccgtaggcccagcctgcggtgatgacctcgtcttcccattccttgagtagcgcgggggaggagtaccagtagaacgggaactgaaggattacgcggtcggcggcctccagtagctcgtgctccgtgtcggcgttgacggagaagttcgggtattcggcgtattcgtcgcgcacgatgatgtcgtcctcgccttgtgcggcgagttcggcaagcagacgggcgttcactcgcgagccgtccttcaggtgcggatggaatacaagaatcagcgttgacatgggatttcccttctataactgctaccaatgtggc

SEQ ID NO: 3064 - DNA, 5606 bp, Unknown
  R19_24m  MAG No. k141_28098
gcgacggcttatgcccccaccgagtccaagcgccgcaagccggcgggcccaatcgtggtcttgagcatactgggccttaccttcctctcctttgccggtctgatgggactgatttgggtaaacgacatgggcattatcggcattatgcgtctgagcaccatctggattgccgcagtatgcatagtgatggggctggtggtcatcattctcggattcagagggcggcgtaccggtggtctgattcctctcggactggttgccggtggatgcgcgctctgcatgaccatcgtttcaggcacgtatggcgtgtactaccgtgatcttggtgccagcggcatcaatactgttgtttcactgagccaatctgtcagtgcgagaaacagcgacggcatgaacgatgtgcaaaaggatggcatcttcgttgccgatgccagcgatgccacgttcgaaacattgcagcaaggtgtggcgttcaacggtgaaaactacaacaccgaccaggcaatcattgattggtccgattgggacaagacacatggaccgcacacagtgaagatgctggatggcaaaacctccatcagtaattgcccggtcggtaccatcaccatagccgcaacacaggcgcaagtgcatatcgttctgccggattcctgcacttacgccttcggcaccgccgactcctacttcacttcgagtgacgtcggcggcaaatacgagatggtatacaacaactacatgggtctaagctttgttttcttcggagctgaaagcgccaccaatcccatgaatgggcctgattacgaatggttggataagggatccgccatgccggacaacggcccagaattaaaaatcaatattccctatgcagtggaagcacgcgtcaacgtggtgtacgcctccgattggaaaggctccacgttccagccgcttgccgatatatacgacggcaacagcacaagcaagaacacaaccgggcaatcggaatgatcaagccgttacaaccaggagatggaatcatgactgatgaaaccaaggaattcgcctccatcgaggatgcgacaccgaccacggccataccttccgaaaccgacgagaccaccgagaccacaaccatggtgaccgtcgatgaccgaaccgataccacggtgctgccatccgcagcggatgatgacaaaacggctgtgctacccgtccccgacgatcatgcggatgcgccggtctcggatgtggatacgcaggcaacagctgcctctccatcgcccatcgaaccatccacagatcggattgccctggaagcagttgccgatgccgtggagggggatggtgggccgattccatctgccgatgatgtaccgatgtacgcagcatcttcagcgcaaccttcctatgagcagtctcagaccgccggcaaaccatgccagcctggggggagcgccaagaacgtccagaatgctaaggatgtcaagagtgccaagaacatccagaaacagagcatcagcgcgcctactgtggtattcggactattaggcgtgattatcggcgtgatcgcgctggttttcgggtgcatatctccggatcggatgatttcgctgttctcgccgaatccgcaattgctgacggctattatctgcgccgtagtgggacttattctggtaatagtggccgttgtatgggccatagtcggtgccgtcaagaagagaaaatagcgttacaaccattgcattacggtcccagtagaagcacattatgacgggagccgaccgataagagccgaccgttctatgctgatggggggaggcatagtaactatgaaacggatttcggcgcggcgggtagcgagcgtcatcgccaccgcgatggcgatgacgctggtattcgccacacttggctgggcgatgatgccgcaatggaacacacggccctacaccaagcacatcgctatcgcttctgccgacaccaccatcacccctgcccatgcgaacattccccacgaggggcgatatcgtacgcgtgaaacccgactatccatcaagaccggcgacggcgtcacgctacccgccgtattacgtgaaccggtcgacgctcccgggccacgcccggcttgtctgttcattcacgggtccggtaccagcggtgccgaggatttcggcgatatcgccaacgccatggcctctgccggcatcgtgaccttggtgccggccaagcgcaacgacaactacaccgtgctgcatcgcgactacccgcgttttgctcgcgaatacgggcgttcgctcgacgtgctgcgtggcataagcggcgtggaccccgccaaaaccggcatctacgccgaatccgaaggcacctggatcgccacgattctaacctcgaaacggcaagacattgcctttgccatacttacatccgcaccggtgttcaatggacgtgagcaaatggccatggctgtcagcgcctatacgcatgaggccggcgcgcccaagcccgtggtcaaagacatggccaaattgatgtcgctggactacgcgccattcgatctggcctatgccgactttgatgccgaccggtatctgaaatccctcaccatgccggtgctggtgaactacggcacctacgatacggccatgcccatcgaacagggggcgcagcggatcatcgccacggccaacaagtccggcaacgagaacgtcaccgtacgctatttcgccggcaaccatcagatgcgggctggtgagggcttattcaccccgaacctgccattggccgaaggctatacgcaagcgctggaaaattgggtgaacggtgtgactgccggaaccaaagccgatggatgggcaacgccccaagtcgccggtgcgacacctcaccagcgcttcgccgcgccgcaacgtaccagatccggtatcgtcggctcgctcggcgtgctggccggtctgatggtggcagggcccgtgctgatcgtgatggcggcgatattaggtattggcttgactgtgttttcttggctacagacgttgctggccgggcgacgtagtgtggcgactgtgcgggccatgcatgcgacgccgagtgggctgggagccgcccaacagcgtacgttgcacggcattgccggcttatctgccggtatcggcacagcggtaatggtgattaccgtgctgttgtatggctatatgagcgccgtaggcgtatcggctgtattggttatgcctcaaccgcagttgttttcccttgggtggagggcattgcaggtgctgaccgtgctgttggtcgtgctgttcgcgtgggaactggaacgtatgtggcggtatcgcgccagcattatcggcgtgcgtcgtgtcatttgcgtgatggtgacactggctgcacttgtcacattgacgatattgtctttctgggggttgttcagtctgtgatattcacggtcgttaccggctccttcccgaatatgtgccactgagtcgccgtgagcgtcacaaattcgggaaggtggatggggcgtgacggcgtggaggcactgtcgtcagcgctgagcggcttcagcctcatccaaagtgtcgaaaccgccgagctggactgtgtgcaacaaggtttcctcagtgatattgcgttgcgggctggctgcggcgcgctcgctaatcatcacctcgtagagctggaaggtccgttcggaatacgtaccaagctcgccgcgcagataggtttcgaatgaggtggcagatggtgtgtcttcggcggtggtgagtacgcgcatcgcctcgccgagcttggggtagcgctcgcggaaatccttggcccaggcgacctgctgggcgatgacctgttcctgacgggccacgcgctcttcagagggacgcggaatatacggctctatgttcttcgtgaaatcttccggcgcggtggaggccatcatgcggccgtatttttcggtcacgaggttgcggcccacgtggtcggccgcgtcaagatcagcggaatagctggtgagtaatggccgctcccatgtgaggaactgggccagccgcatctggtggaacaccggccagttgccttggcatgccgcgcgtccaccctcattgttggtgcgctggaactgatcccattcatggcgcacaatagcctcgcgcagttcatcatcagtcagttcgttggtcatcgacgttcctttcactaatatctccctctgatgagggagatggcacggcgaagccgtgacagagggagggaagcggcggctgtactgaggtccctccctcagtacagccgcaggctgacagctccctctgatgagggagctctaaagcgccggatcatcagagggagcttgaatctacaaacttttaagcaccggatcatcggagacgatgtggtcctcgacatacgggcgctgccattcgaggaaggtctcgccggacgtggtcaggtgttcgcgtttgagttccctgacgatatccaccgcaatctgctccacaacatcgttgattttctcgattgctggagccgcgcccttgccgccttcgccgaatccggccccgccatagcaggctgtcgaactcaatcgcatcacggtttccaactgttcgcccacgttcggcaacagcgcgaacatcgagccagacagcttgcgcaatgctgcgaactgccacttgtaatacggcatatagcccaccaccatcggcacgttaaccaggaacaccaacgaggcggtggcctgcacgaactcgtggatggacagccatgcggccgcgccgtcgccgcgcttcaacgaacgcggcagattatattgaccggcctgggcgatcatgcccaatcgcttggaaatcaaggcaagccgcacgtcgtcgggcatatccttgaacccttggcgtgttttggagaactgcccagtggggtctgcgaatacttcgccattggtggctgcggccagagtcgattcagccagcatcagccactcgtgcggcgcggtctgcgccggcgcagtgcgatacccggtgatcgactcaaagaagtcaccgatgcggaacacgccgtcacggcggttggcaccttgtgcgcggggcgtggtgggggagaacggtgtatcaatcggagtcgtcatcgcttccgccacatcagaggacgccgcgcctgactcggcagtggcggtatcgtccgtagcggtgccgggggtgggtgcgtttgtcgcatcgggtatgacggtggagcctgcacctgcggaggggaatgtcccggaagcatcggatctggcatgcgcctcgaacgtcacgcggccttgcgcatccacgctgaacttgcgaggcagcgcctcgtaatcggcctcaagttgctcgccgatggccgcgtaatcctcatccgtaagccacaggcagaagcgcgggccgaaatcgtggtcctgcgaatacgcatcatcgaatccgtagcattccgagccatgacccaccagaccggcggcgatacgcccggcatactgcggatacttcgccgcaatcatcggcttgcccatctgcgtccagaacgcgcgggccagcttcagtccggacaccgggcatgcggaaacggcctcggccgcgcccgcagaaccggtcgacaccgaaacggtggatggggaa

SEQ ID NO: 3065 - DNA, 11743 bp, Unknown
  R19_24m  MAG No. k141_28797
atccattcgatggcctgcggcacatcccagacctggttggcgtcgacggcgatggcgatgtccgggccgaccgcttcacgggcgagcttgagcctgcgcaggtcatcctcgaggttctggccgaccttgagcttgatctgcttgaagcccatgacctcggtctcctgcttggccaggcggaccatcttctcgtcggaatagccaagccatccggcggcggtcgaatatcccggataaccgacttccttgaggtgggcgatacgctccgccttgccttcctgggcggcgcgcaggatatcgatggcttcctgcggagtgagggcatcggtcaggtagcggaagtcgagagtcgcaacgagctcttcgggctccatctcggaaaggagcagccagagcggcttgccggcgcgcttggctttgaggtcccacaaagccgaaagcacggcgccaatggccatatgctcgacgcccttctcagggccgagccagcgcagctgcgaatcgcgcacgaacagatcccacgcgagacgcatgttgtcgagcagttcctcgacgttacgtccgataagggtttcggacatggagtcgatggctcggacgacgacatcattgccgcggccgatggtgaagacgaatccgttgccggaatcaccggcatccgtgctgatgacaacataggcggaggaataatccggatcagggttcatggcgtcggagccggagaaggtggccgacgtcgggaatcggaaatcataggtggtgactttggtaataacgctcacgatgcgcttccttctttggaaaatggttaatctcaaaaagggaggacggccattcggccgccctccctagcagtggcgggccggatgtcagtcggcgtcggtggtgaccttgaagccgttgtcctttgcgtaggtcttgagcttctgctgagccttggccatagcgccgaccatgtcaccgccaaccttcatttcaggagtgatgacatccttatatacgactccaacctgagacatgaacggaagatactcccaatcagtattgaccttgtccatggactcgaagtagacggagttcacgtcagtattgacaaagtatccatctgtttccttcatgttgcggatgtcttcgctatcttggtaagcggaagctgccatgaagtagttgccgtggttgttatcctgccaagactgaattgcttccttgtcggaatcaagccagttgatgaaggcaagggctgcagcctgcttgtccttagggcatgccgcggaaacactcatcatggagccgacggaagaagacttgaaatcatcggcagaatcaccgaatgcaggtggcagcgttacctgaatcagacccttaagagatggattctgtcccttgtaggagttgccttgccagttctgagaaatataagtggcataggtgccctcattcgtggcgcggttgaacgcatcggtccagcctggagcggcctccatgaccccatcctgaaggcacttttgcaggaattcaatgaactccttggtagtgccagaagtcatgctcaagctgatgtcatcgacagaattgaccttccaagggcgcgcaccagccgaacgcagcaaatccgtaaagcaggagatatcgttattgatgaggacgcccatatacttgctgggatcttccttgtgaagtttgacgccttcttcatagaattcctgccaagtggttggcaccttgagattatgctcgtcgagaatgtccttacgcacatacatggccaaaggagtggcgtcagtcggcacgccccacaggccaccagcataatgcacctggctccaagcggtctttgcataaagcttgctccacgccttttcgatatcatcgttggcgaaattcagcagagctccagaaatagcgtactgttcgaatcggtcagcactcatctgcacgacatccggaacatctttattggcagcaacgacattctggaacttggtgaaatggtcgcttgccgcgccggtgttggtgaatttaattttgatgtgcgggtacttcttctggaaagcttcaatcggccctgccatctgcttcccggagaatccccatacgttcagctcgatttttttggaagtatcggtgagagcgttgttaatgtcttctacagtgactgcagttttagtgtccttggcaccagtacttgagccacaagccgcaacgctggctaccatagtaagcgccgccagcgcactgacgattttggtcatcttcttcatgattactcctttgtgtgtcatgaattactgtcttattgttgttcttcaaatggatgtggatgccgcacggtcattagagcaacgaatgggtgatcgccaataaccgtgcggcgaggattcactgcttgactgcaccagccgaaaggccagactgccagtacttctgcaggaacatgaatgcgatgatcaacggggcaactgcaatgaggcatccggtgacaatgtagttgttcggaatctgaccgtccgcggtaccttcggcacccatcttcaaccacatgttcaaaccgaccgtcatcgggtagtcgttggtgtccgagagcatgatcagcggcaggaagtagttgttccagacaccgaccagcgtgaacagcagtacggtgacgaaacctggagacagcagcgggaaggcaaccttccagaagatggtccacgaatttgcaccatcgagcttagccgcttcaaggagagaagtaggcaccgatgtctgcgcataaataatcatcaggtacagtccgaacggcgtggccagctgtggaataatcactgcccatggggtaccaaccagaccaatcttcgagtacatgaggaacagcgggacagagatgaccgtggccggaatggacatgaatgccaaggtgatcgccaacagactattacgtccggggaaccgcattgtggcaatggcgtagcctgcgagtgtggcgatgatagtggcaccaaatccggcgacaactgcatacatcactgtgttaagcaaccaccgtgcgtatgtaccatgctgatatgcaagagtttcctgaacattctgccagaacacattcttgtcatcgaaccacagaccaaaggagctaaacatgccctcgttggtctttgtcgcagagaagaacacccacagcaacggcacgagacagtagatgaccatcaggcccatgataatgtgcagcagccagttaagcacacgctgcttgccggtcagctttggagctgcctcacgctgctgcatacgcttatagcgttggctcgccttgagcgccagcttggcgtctctgcgctgcagcgacttggaacgtggttttgcgattgcttcactcatcacttgttctcccacttattgccaatgaccttcacgactgcgacaagacccataacgatgacaccaatcaccaaggagaccgctgcagcatagttgaggttctggccgttgaacgcaaggttatatgcgtagagattcggcgtgtagttactggtgatcacattcggcgcggaattcatcaagatgctcggttcgttgaacaactgaagcgtgccgatcaccgagaagagcacggtcatcataatggatcccttaatctgcggaatctttaccgaccatgcgatacgcagctcggatgcgccatcgatacgagcggattcgtacagctcgttcggaataccgatcagtgcagaataataaatcagcatgttgtagccaagagaacaccaagtgcagatgtttgcgatggcgaacagcatgagcttttcagaaagcatgttcggcgcagcggccccgatcatagacgcaatctggccgacaaggccatacttgtcgccgtagatatatccccacatcagtgctgcgatgacgcctgggacggcataaggcaggaacagcaggattcgcggcactgcgatatggcggattctctgggaatccagaatgagcgccgccacaagggaaaggatcaaattgagaggaatctgaatcgccgcataaatcagcactcttctgaaaccgctccacagcgcttcatccttaaatgcagctatgaagttgtcgaagcctgcgaatgtggtgccgccaagaagggactgcttgaagaagctgagataaagcgcgtagaacatcgggatgatcatgccgaataggaagaccaccacgtatggaagacaatataacatgcctatgtactcgcgcttcggcttgcgcatcccggaagtatccggtttcgccgttgcatttgtcatagtttttctctttcttcttaacccgtctgaatgagcccgccaacaacatcgttgccattgccgtttcattcatcggtacgttcaatatacaaggttctgcaaaaaagagcaaataaaacttcgttgcgcgtggcgaaattttctttatcttgttttttcgccttaaaagggctttattgcaacgatatgcacaaatcgtactcatcgaagaaacagcagccaatccatgtctacaacacccatttccgctatatagacagcaatacgccgataaaaaagctgttttagagtagcgaaaatttcgctactctatatataacgctttttttgcagcgtcgcatacgaaaagagaagagtcatggccacaatcaaaacaacaaacagaccgaaggtctccgacatcgcccaagcggcgggagtatcccccgctaccgtgtccaaggtcatcaacggccgtgatggagtctccgacgagacccgcgatagggtggaactgctcctcgaagaagctggattccgcaaaaaacttcccacaacaaaaaccatacggtcaatcgaactggtcgtcagcgaaatgaccaacaacggcaccgtggaaatggtcaaggagacagcttcatacgccagagattttggcctcggcatcaccgtaagctgcgccggaccggattccggagaatacgcaacaagaaacgaggccagcagctgcctccgtaacgccatcgaacgcaacccactaggcgtcatacttctcttatcgaatatctcatcggccgaggaatcgctgctgcagacgaggaacatcccatatgtgtttgtcgatccggtcggccaggtctccgctgacgcattgggagtgggcattgataactggaccgggggaatgctcgccacgcaatatttcatatcattggggcatcgacgaatcgccgtcatcactggccctactaattcacagtcctcgcaggcgcgactgagcggatacatggcggcgctgcagaaaaacggcatcagcgcggatccacatctcatcaaggttggcgactacgtgtctgacaaggcatacaaggcggcatgcgatctcctggaaatgagggagcaggaccgaccgaccgccatcttcgcgttcaacgatctcggcgcgatcaacgtctatcgcgccgcccgacagcacggcatcagtctgcccgaacaattatcgatcatcggtttcgacgatgtctatcctgcggcaagcatgtgtccatccctgacgaccatcaggcagccattcgacctcatcgccagacaatgcatcaacctgattctcaaagcgcgggaaggaaaggtggaacagaattacttcatttttcccacgcagcttgtcgaacgcgaaagctgcgtatcgccagcacgtccgtaactcagcaacggaacacagaatcagcttccacgaagcacccatgcatatgcaatccgtctctggcacaagcatttacttctgtttaccagatgaaaatacaatatcgtgcgattacgggggcgcagccctagcctcagctggaggtcaggaaggtttcgttgcctcgggtgaagtcgaggacggcaccggcgagttggacctcgtctgccagttcggggtcggcagccagaagctgctcggcacgggtgcgggcgtcggcgatcatgtcggcgtccttgaccacgcgcaggagcttcaggctggacttgccgccggattgggcgtcgccgagcacatcgccggcaccgcggaattccaagtcggcttgggcgatttcggcaccgtcgagcgagtggtgaatcacttcgagccgttgctcggccggggagccgggttccgcacgggaaataaggaacgcccacgagttggtgccgccacgccccacgcggccgcgcagctgatgcaactgagagaggccgtatcggtcggcatcaaagatcacgatgcagctggcctgtttcacatccacaccgacttcgatcaccgtggtggacaccagaatcggagtctcgccgccggcaaaatcggccatgacctgggttttgacgtcatccttgtcgcggccggtcagagtcgcaaaccgaatgccttggaattgcgggagtttctgcaaccggtcggcgatttcggccaccgcatgcaatggcgggcgagccacggtttcgccgttttcgtcgaaggtttcgtaggggtcgtcgatgccgatggcgtcggccgccgcgcgcgttgcacggccgcccgcagctgtgcgggcactggaaccagatgctgcggcgcgtccgcgggcagaaccggctgctgccgaaacgccggaaccgccttcgttcccctcatcatccgcatcaatgcgcgggcacacgatataggcccgctcccccgcgtcgactcgcgcgcgaatgtgcgcgaacatacggcccatggtggcggcgtcggcctcattgaccaccacggtgcgaatcggtttgcggccgccgggcaattcggtgagccaggaaatatcgagatcaccgaaccaagtcatggcggcggtgcgcgggatgggcgtggcggtcatcaccaatagatgcggcgtggtgccgtcatcggttttggcgttgagactttcgcgctgttccacaccgaaccggtgctgctcgtcgattaccaccaaggccaagtgcggggcttggaaggtcttggaaaacgccgcgtgcgtggccacgataatgcccggctcgccactggacgccgcagcaagtgctttacgtcgcgcagcaagcttcatgccgcccgtcaacaacgtgactggaatcgctggcttgagttgctccaccatccggccaatggtttcggcatgctgctcggccagcacctgagtcggggcaacaagcacggcctgatagccggcgtctacggcttggagcatggcagcgagcgccactacggttttgccggagcccacctcgccttgcagcagacgctgcattggccagtcatgagccaaatcggcggcaatatcatgaataacctgctgctgccctgcagtgagggagaacggcagggatgcgatgaactgatcgcgcagactgtcggttaccaacgggcaagagtgagccgcggatttatgggcgtgcgacctggctttaagcagcgaggtctgcgaaacgaaagcctcctcatagcgcagggtttcgatggcctccttgaaccgggtcgtggaggccggatcatgaatggccaggaacgcctcagcccgatgcatgaggttcttggccttgcgcaccgattcgggcagcacatctgggatggattgggagagcgcctcagcaccggattcggcggtcgtgccggaattctcttccccgttttggacggcgatggtgtcggtcgtgggagccacaatgccggctgacccagcgccagcgagttgcccgtcaggcgtggatgacgtgcgggcccccatcatccacagcaatcccagaatcgtctcatgaatatgttcggacgagatacgcgaactggcgtgatataccgggcggggccggcagacgcgggtaagcgcctcttgcacggtatcggcgtcgtatttcagcgcggccccggaagaggcagccgcggccggcggatacgcggactgcacactggcatacggatcggtacttcccgcaaacgcaccattgccggatgccgcaccccgagcgtaaccctcaagccccgctcctgctccggccgacccgggcgcgacagtgaggatttcggggtgcgtgaattgcagctgccccatgtattcgctgggcataccggagaccaccacagacgtgccggcgcgcagccgcatgctgacccaatccacatacgatttacgatacgaaaagaacgtgagccgggccgtgctgccgggtacgcgacgcgaacgggcaaagtcggcgtcgtcaaccgtcgcctcgagtcggtagccgcggcgagcgttcatcggcaccacgcgcatgtctcgtatcacggcggcaaatgccatctgctggccgggtgcggcctcgcggatggcgcgaagcggcaccggttcggtgacgcggaagggatagtaggtcagggcgtcgccgacagtgacgattcccagcgatttgagcgcggacacgcgacgcttgttggtgaccagcgaagcgagagtggtgtccatagtgatgctcatattggcctattctattcgcacggcctctttaggccgcagaaacaacaaaacccgctgagccgaagctcaaacgggttttgctccacgttagtacgcgattcacgcggccacgcgctgaaccttgccggccttgaggcacttgacgcacacgcgcagacgagtgttctcgccatcaatcgtggtgcgtacagactgcaggttcgggcggaagctacgcttggtacgacggtgcgaatgggaaacggtgaaaccggtctgcggtcccttgccgcacactgcgcaacgagctgccatgatggactcccttaaccttgatgtgtcaagtctttcacgcattcgaccgccggtttcacccgacatgccgaacacacaacttcacaaatatatagcccaataccgacaaccgcaactcttgcgtgtatcatgggcgaacttcggcggttcacgcgcggttcgagcgtaacttgcgagtgggccatcagcggttcgcgagcggttcggcattggttcgccagcggtccgcaagtagttcgccagcagttcgccagcggcgaattacgctgcaaatcgtagcgtttacccgataaaacacgccggactgcctattccgcatccaacaaactctcatataatctcggtataagagacggcaagggacgaaggggtcctcgtgcaacttacgacgaaggaggctgtcatgttgaatctcaggcgaggtatcggcactcacgagcccagcgtgatttcactgggtcaagtctgggtggacatcatgctcaatgtggacgaggtgccggcacagggcggattcgccgtggccgatcatccgaagccctccattggcggcagctatcgcgtactgcaggcggccagccgcatgggcgtgccgaccgagcacgccggcattctgggcaacggcctgtgggcgcatttcatccgccagtcattccaggacaacggcattacgcatatcggccaggatcgtcttgatgaggattccggtttccgcgtggtgctgagctccggcgcgccgaagaagacgttcatcgcttcctatggcgccgaggctcatggcgacgcggacacgttcaacacgctggagccgcagcccaaagacgtggtgcacatcagcggcaacacactgatggaccacacggccaccggcgtggacggattcctactcaaggccggtaccgacccggctgcacgcgactacacgctggtgatcaatcccaccaatacgttgcgtctggtcaatgaccatatgctcgaggacctggtgctcgcacgcccggtctggtcctgcaaccgtcaggaggccatgacgctggccgagcgcctgggcgcgccgatcgacgacagcaaggtcaccatcggcggtggactcgacgacttcatgcaccagttgtgtgacggcttgggcactacactgcgcgcgccgctggtggtgcgtgtcggcgcccgcggcgcttggattcgtgagccaggtggcgagacgattcatatcgagggatacccgaccaaggccgtacacacccgttcggcgggcggttgccacaccggcgtgatgtgcgcgatgctggcaaagggccatagtctggccgaatcggtaaagatcgccaacgcggcggcatccatcgccatccagcgcagcctcaacggcgtgccgcaatgccccgattatgacgaggccatcgcgctgatcggtgaatagtttccggacgattgagtggatttcctcatctgggggaatccacgatcggctcccttcagtccgcttcgcggccagctcccctcagcgaggggagctatttttttgctctggctcccctaagaaaggggcccggcattattcacccgccgttcaactttggcggttttctaccctagtccgcgcttctacgatagattgagttgaatactgtcgaggagtgcatatgactgatcccgcaaatgtccacgaaccggtgccgcaaagcgccaaactgaccgcccgcgagaagaagtggatcatctacgacgtcggcaattcggcattcgtgctgctctccaccgccgtcatccccatttacgccaaatcgctgatgccggcggacggcaacatcgtgtccgcctggggctacgcgcaaaccattgcctccttggtcatcgcgctgctcatgccgttgctcggctccatcgccgacgtgcaaggcatgaaaatcaagttcttccttggcttcttcggcaccggcgtggtcacctgctgcgcaatggccctgcccctgacctggctgccgttcctggtcgtctacattctggcgaccatcggccttaacggctcgctgacgttctatgattcgatgctcatcgacaccacctcgaacgagcgcatggacaaagtctcctcgcacggctacggctggggctacatcggctccaccgtgccgttcatcttctgcatcgcgctgatcttcggcggcccgtcgctcttcggctggtccacggtggcttgcacgcgcgcctcgttcatcatcaccgccatctggtgggtggcattcaccatcccgctgcttaccagctaccgccaagtgcactatcgcgccacccgtgaccagctgggctcggccatgcgcggcacgttcagcgaactggcgggcacgttcggcaagatcgtgaagaacaagccgttgtggatgttcatgatcgcgttcttcttctacatcgatgccgtgaacacggtgatttcgatgagcacctcctacggtgccgagcttggcatcgactccacccagctggtggtggcactgctcgtcacgcagttcgtggccttcccctgcgcgattctctacggtcgtctggccggccggttcggctgcaaagtgatgatcacggcggcggtcgtggcatacatgtgcatcgtgttcttcgccgcgttcttcatgaaatcggccgtggagttctggattctggcgattctggtcggcatgtttcaaggcggcatccaggcgctctcccgctcgtactacggcaagatcatccccaaggatcacgccaacgagtactacggcttctacgatatcttcggcaagaccgcctcgatcatcggcaccttcctggtggccaccaccacgtccctgaccggcaacgcctcgttcggcgtgctgtccaacgccgtcctgctcgttgtggcgctcatcttcctgctcctgcagaaggacccgacgcgggagtgatttgccggccctcggcaactctgcgccgcgggcgacatctcgcaacccctgcaacgggccctaatagcaatggaccatcgccacttgatca

SEQ ID NO: 3066 - DNA, 10519 bp, Unknown
  R19_24m  MAG No. k141_29438
cgctgccatcgccggccgtccaccatacgccgccggcgacggcaaggacaagcactactgtcacgatggcggcgatacaagcgttacggcgtttgcgttgtttgcgcaaccggtactgttccatcagtttctcactcatggtcagcccctttgcttggatcggctcgtgcatcattgcacgaagcccctgattccagtatattttggtctctcttattttgtgcgacgagccacaatccaccgcacggcccacaccacgccgaatccgaggaagctcgccacggcgaacacgatgacgaaatgcaagacctgatccatcgagccccaggagaggtatcggtcgccgatcagcgtgcaggtacttcctatcgggcacgtgtcttcatacaccgtgatgagcgccatgagcatcggcgcaggtaccagtgtgcacgccaacgggaacagcaggcttttccacggatacgtcagtgaggccgggcgtagcgcgtagatgccgttgatgaccagcaaggcgggcggaatcacaaaattgattagcaacgcggcggccatcgcagccatgccgccccgtaaggtcagcgccaatagcaagccgtacatgattgccgtcgccagccagcagccgaagcgaatcgcatcctgacgaatccatgtgagcagtcgtccgctcgccgtctgcggattcggatccacaaacaattcgcgcagaccgtagcgtccgattgcatagcagatgaacgcaacggccgtataacagatcaacagcatggccgagccgatcaacgaatgaaccaatagctgatggccgctttcagcgtgcattagcttccaccactgagcccaggaacggtatgggaaccccggccgtaagcgaagattggtacagccgaatgccagcggtccgatgattgcgctcgccaatgggaaagacagactgccggatcgtatcgaaccgagtatcaggctggtgattcccaacaccaatggccagtgcagaaccataccggggaaccatacgaacaggtttttggcagccctgtcaaggacctcgtcgggcatgagatacattgatgagctccactgcagcagcaacaacaccgctatcagtacaaccatgccaatccaatgcgcgcggttccacgcgaatattcgttgcgtcccgcgctcggcggcggcattgcgcatatcgctcctgttgagcttgctgagtgcttgtgcacggttcattgcagtcctcctttaccgccttgtcaaggattgatgatgattccatcgtaaatcgcgcaggaaatgtggaatgatagttgtcatagtgaccatgacatgtcaggacggagcagttcggcgtcgggcacactgaaggggtgaatgtaatgggagaagcgcgcaaccgcaacatacgcatcggcattgtggacaatgacccgtatgcgctgaaagtgttcggcgcgctaatcgagcgcatgtccagcgattttgccgtgatatggacctgcgatttgggtgccgtggccatcagccgatgcctgagccccaccaagcggcctgacgtgctggttacggatatgtctatgggcgacgtgcccggtaccgaagtctgtcgtgcgattcgtaccaaaacacccgaggttgggctggtgggtgtcacctcatacgcgctcgcgtcatttcacgacgaggcggctcgctgcggggcgcaggccttggttggtaaaaccgatttgaacggcattgcgctcgctattcgcaatgcagcccaaggattgtcgaccaatgagctggtactgggagatgaggggagcggtaattcgctgtccttcatggatgccgcaaccgcctacgcggtgctcgaagatacgtcatacgcgcaccgtggcgcgctttccggcaaagaacgcgacaccctgcgtatgtatgcggatgggtcgaccaccaaggaaatcgccgagcgattgggcatcagcgtggccactgtggcgacttttgaacgccgcgcactcgccaaactcggcgctcgcagtcgcgctcatgccatatcgatctgcgtgaaacggcatgagatttaagagttggcatgggcggtatgtgcaacggcatggatggtaggaaaggaactgctatgaaagcgttacgacaccgattggccgagctggatagcggtgttcgcaatgcatggctgttgattgccgtactggttgttgccttgatatgcacgatggaaaccatggcgggcttggctgctgacagtgtctcggcggcggactgccttgcggagttcatattcgttgccattgtggggtggatggcgtttcgtccggtcaccggatgcgtggcggtagcggtggcttggatagtgttgtgcatgagtccgatctggatgccgtcgggtgcaatgctcgccgtgttattggcggtgggtattgccggatacgccgataagcgattggcgctggcggttgccggcattgccgttgtggtgtggatgttgtcgcgtggtggcgtggccattccttggcttgatggcggctcagacacgatgagcggttctgcggatggcgcggcgagtagtagtgccctaaacggtagtgttgctgatggtggcgctgctgatggtggctcttcatccagtgggtctgacagcgcagggcagtcgggaagcgacttcaccggaagcgcctatgaatcgagcggttcttctgccgagcatcgcactgggcaagtgattcttggtgcgattgccctctatggtgtgatgccagtggccgtgttgtttattggcttcatgcttggtggcatggcggcgcgatggaatcacgaacgcagcttggttcgagcggagttggctcaccgccgtcagcaggaacgcacagctcaggacattcacgattacgtatccaatgatttggcatacctgattttgcgattcgacaaggatattgccgatggcaagaccccttctgaagaagaattacgcgaactgcgtagcgtggctatgggcgcattggatcgcacgcatcaggtcattgatgttattgaaggcaggggagaagcggcgcacagtgcagtgactccgcatgattcgaccgttgatgccgcttctggcattgcatgtggcatcacagacgctgattgcccgctagccgagcaaattcgtgatgttgcgagcaatggtgaccgccgattatcagagcttggctttgaaggtcagacgattatttccggtgctcatggcgcagccggtcggagtggcctgatcgccgggctgctggaggaactgtacggcaacatcgccaaacatgccgacccggaagcgggctatgtaatgacgattggcatcggactggacaccgtccgcatcgcctgcatcgacacggcccgcacgtcatcggattcggatgcggatggcagtgcggacctatccaccggtaccggtctcaaccgttaccgacaattactagaacaacaaaacggcgccctgcatatcaccacgcaagacgccgaatggacattatcagcagttattccactgtgaggaaaccgatcacccaaccgacttctgcgcagtctccgcgccaaagaagccgacaatcagcatcgatgcaatagcaattgcgctgatggccacaaagatggacgtggcaccaagcgaggtaagcatccaacccaccaccataggcatcaacacattgagcagcttggccacggcgttcgcgaagccgacgcaacggaagcgaaccttggtggcgaacagttccggagcgtacacagccaccacggaagccataagcacgtacaggcacatcatgagcaggaagccaacgataattgcgctcacggtagaggtctggaaggcatacattaaaccgaacacgccagtgaacaggaaggccggcacaatcgtgcgcttgcggccgatgcggtcgataagcagagagccaatcaggcagccgaccggggcaccgagcatcatcgccgtggaggtgagcagcgagctggacaggttaataccacgcttgaccagaatcgtcggaacccaagaagtgaaggcgtaggagcacacgttcgtggcggccacagcaaccacagctacaagcaggcagatgccgagcgaacggccgccggcgttgcgggtgtcgctggtgtcggccttggcggctgcgtcgatcagttcggagccgttggcctcaagctgcttgacgatggcgtcggcctcatcgtaacggccgtgcacggcgagccaacgcggggattcggggatgtcgcggcgcagccaccagatgatggcggcccccagaccgatggccacgaacagcggacgccaggaccagcgggggatgatccatgcacacagcagcatagcgatcggcacaccgcagttggccacgagcgagacaatcgcgcaccagtggccacggcggttcatcggtgcgaactcgttgaccatggcgaagccggtgacgatttcagcgccgaggcccaggccggcacccagacggcacagggacagcacggccatgttcggggcgaatgcgccgaggaaggtgaagccgccaaacagcagcaggttgatttggtaagccacgcggcggcccttcaggtcaccgacgaagccggccagcagcgaaccgaccagcagacccaggaagcctgcggacataaaggtggaattttgcgcaacggtggaccagtgtgtggccaacgcgctggaggcaacggcgctgccaatatatacgtcgatgctgtccatcagcatgccagcggcgaccagcgccacgatgcgatggaacatcggggtttcatgtgcgcgatccacgcgcgagataatatcctgaaccttggcttgatccgtcacggtggtacgtgcttgtgcgctttccatagccgcgggattgccggaaatctgctgttcagcagcagtcatatttgagccctcttcttgcaaacctgcccgcgtgcaactgctcaatgatgttgcggcgagcgaactcttgattggactgcgtgttccgttcgccctcccattgtgtgggatgaacgacgtttgcagtccaagtcttgaattccacgtagcgagccaatcgttgtgagatagctcactacatggggcttaactataggttcgatcttgtggcacgccgcgttgcggtcacattgtgaacgataacagagtttgtaacgctcctatatatgccccacttacgctcttaccccgttgaaagaaggcagaaccgtgattcccatggggcggtaaaacactcatggggcggtatttggcccatggggcggttagcggattttgcctttccgcagaatagagccgttttcgcctaccgccccatgagggttttaccgccccatgagatatttaccgccctatgggtgagttaccgccccatgaaacgtgtaataacaaagcatgcccttgctggtggaagcgatgctttgctatttcgcctgcttgtcggcgaggatctcatccaccagcttgggcttttcggtcagctggccggtgaagccgggacggatatccatgtgcagcaccagagaagtgcggtagccctgctcggcgagcttcttggcggcctcaccggccaccttgagcacgtcgtccagattgccttccacgttggtgaacagggcgttggtttcctgcggcagggcggattcgcgaatcacttcgacggcctgagccacgtatggtgaaacctcggagcccacgccattggccgacacctggatggctgccacggtgttgaggtacggtttgccggtttccgggtcgatcggcacttcctgagtaacggcattacggtcaagaaccatgattctcctttttcagtagtgttaagctcccctggcaaggggagcttaacaaccacacttatgtcagcgatacttccagaaatgatccatcgggccggagccgtggccgagattcagctgggtcttcagcgcaccggtcaggtacttcttcgcatgcttgatggccttgggcagcgtgtcgccaagcgccagatacgaggcgatggcggagctcagcgtgcatccggtgccgtgcgtgttcggattattgatacgcgcgccatcaaaccaggtcacggttccatccgtctcggcaagcacatcgttggcatcctcggcgccatgaccacccttgaccagcgcggcacagccgtaacgctccacgatgcggtgggcggcggcctccatatcctcctgatcgcgaatcagcgtatcggtcagtacttcggcctcgggaatgttcggagtcacgaccgtagccatcgggaacagcttgccggtcaaggccgcaatggcatcgtcactgatgagcttggcaccggaagtggccaccataaccgggtcgagcacgatgttcgtggcgtgatggaaggtgagtcgttcagcaatgacgtcgatgatgtcagtggcagacaccatgccgattttcaccgcgaccggcggaatatcctcaaacaccatgttgatctggtcggcgagaatgtccggtttggtgtcctgaatggaacgcacgccggtggtgttctgtgcggtgagcgcggtgatggcgctcatgccgaacacgccgcaagccagcatggtcttcagatcggcctgcatgccggcaccaccggacgagtcggagccggagatcgcgagaacagcgggaagtgtagatgttgcaatctgtgccatagtgttcattctaagtggggcccatgatgtttttcggagcggttttccttgatgttttgccgctcctgtggtgagatgggagggtttgctgattgcgattgattcatgaaatgttcgggaggggacatggctgataacgatgtactgcgccgtgacggcgtcttggtacgcatcaccggttttgacgatgaacgcaccgcatattttggcgtaatgcctaatgggcacaccacacagctcacatttccgcgtcaggaggtgttcgatgtgggcgacgtgttgctcgtcggcacggatttctatcgtaaagtgccgcatgatgtgtggccgttgaagccccgtgtgggcatcgtgcgccgtgcgctcaacgaaggcgtggtcctggagacttccgacggcctcgaactgcttgaaggcgattacccgaattcgatcatgcccggcaacaccgtgcagttcaccgacctgttcggcatcgaacgagtgctgtggcccacggccatccgcccaggcgaatccgatcacgatgacgacatcaagcagtaccgcatcacgccgggcagcgatccgtcgcttaccttcgattcgttcggcggttatgagcaggtgatcacgcgcgccaaggagcttatcgaaacgcagctgggcaacagtgcgcagatgcgtgcgatcggtgccaagcccatcaagggcgtgatcttcaccggtgctccgggcaccggcaaaacgcatctggcccgcatcatcgccaatgtggcggacgcgcagttctatctggtgtccggcccgaccatcgtgagcaagtatgtgggcgatagtgaggaaacgctgcgcatgattttcgccgccgcgcaggcggacaagcgcgccatcatcttctttgatgagatcgattcgattgcgtcctcgcgcgagaacgataccaatggcgtcggcaagcgcttggtggcgcagttgctgacgttgatggatggtttcgagtccaagggcaatgttgtggtggtcgctgcgaccaatcgtattgaggacgtggatcccgctttgttgcgtccgggccgtttcgactggcagattcctttcccgatgccgtctgagcgcgaccgtttgggcattctgcaggtgcaggcccgttcgttgtcaatcgagggcgaactgccgttggtggatatcgcacagcggaccgaaggctggagcggcgccgaagtgtgcgccatctggaccgaggccgctctggtggccgccaaggaccgccgcggcgcgatccgtgctgccgacctcgtcaccgccttcgagcgagtcgagcgtcgtcccgaattaagacaccaccgggcataataattggctcccctcagagaggggagccagagaggtttactcctgggcggtggagtagagcttgccgccttgggcggtgtacttttcgctcatcgcatccatgccggcgaggatttcttcggggctgagcacgttggcggacaccacgtcgttatcgacattggccttggccttagccagtgcctcggagtcgatgccagcagcagcctccttcacgatttgctgctgagcggcctcgccaccgaatgccttgcggatgttctgggagatggccatcgagcagaacttcgggccgcacatcgagcagaagtgcgccatcttggccggctcggcgggcagggtgtcatcgtggaaggcgatggcggtgtccggatcgtaggacagattgaactggtcgagccaacggaactcgaagcgagccttggaaatcgcattgtcacgatccatcgcgtgcgggtggtgcttggcgatgtctgcggcgtggcaggcgatcttgtaggcgatcacgccctgcttcacatcatccttgttcggcaggccgaggtgttccttcggggtcacgtagcacagcatagcggtgccgtaacgaccgatctcggtggcgccgatggcggaggtgatgtggtcgtaacccggagcggtatcggtggtcagcggtccgagggtgtagaacggggcgcccttgcacacggccttctccagctcgatgttcatacgcacggtgtcgaacggcacgtggcccgggccctcgatcatcacctgcacgtccttggcccaggcgcgctcggtcagctcgcccagagtcatgagctcggaaagctgcgcggcgtcgttcgcgtcggccagggagccggggcgcagaccatcgcccagagagaacgccacgtcgtacttggcgaagatgtcgcacagctcgtcgaagtgcgtgtacaggaagctctcctggtggtggcgcaggcaccagtcggccatgatggagccaccgcgggagacgatgccggtcacgcggttggcggtcagcggcacgtaacgcagcagcacaccggcgtggatggtcatgtaatccacaccctgctcgcactgttcgatcacggtgtcgcggaacagctcccagctcagcttggaggcatcatcctcgaccttttcgagggcctggtacatcggcacggtgccgatcggcacgggggagttgcgaagaatccactcacgggtggtgtggatgtcgttaccggtggacaggtccatcacggtatcggcgccccacttggtggcccacgtcagcttctccacttcctcgtcgatggaggaggtgacggccgagttgcccatgttggcgttgagcttggtcaggaaggcggatccgataatcatcggctcggcctcggggtggttgatgttgcagggcatcaccgcgcggccggcggccagctcggagcgcacgagctccacatcgcagttctcgcgggtggccacgtactgcatctccggggtgatgatgccgtggcgggcgtaccacatctgggtgatcgggtggtccttggcgcgcatcggctcatgcttgcgtccacgccattccttggtggcgcggccgcgcttgatggcgcgcttaccatcatcctcaaggttgcggcggcggccctcgtagtcttcgatgtcgccgcggtcgcggatccagtcgagacgcaggggcttcaaaccttccttcgggtcgcacttggggccttcggtgttgtagtcgtggaacggcgggttcgggcccacgccgggcgtgtcgctcagcttgatttcggtgtacggcacttccaggtcgtaggaaccatactgataggtgaacggtacggacttggtcttgcggatgtgcgccttgtcgcgctgcttggaaccacgggcggcgatgtccacgcgctgctgcttggcgagcttctgggcatccttggcgtccttggcgttggtgaacttcttctcagtggcctcggagccaggctttgcggccccttcctgagcagcctgagtatcagcagcgggggtgtgggctacgacgcgcggcgcgtagccgtgcttcttgttgccgcggacggccttccagccttcgaccatggtgcgcgcggcctcttccgggttctcggcacccgcgatggcggagaccgcgaaccagccggcggccttggtgccggcgagcatggccatatcggctgcggtcacgccgccgcccacgaccaccgggaattcgctggcagcgcagatggtgttgatctgggcggcgtccagtgtcttgccggagccgtcgttgccgcccacggaagcctcgggcttggtggtggagacgtgcagagggccggcgccaatgtagtcgatgcagccgtcgggcagctcgttgatgagctgaacgaggctttcggtctcagccgacagacccacgatggcctcgtcgccgagcagggcgcgggcttctcgcggctccatgtcggtctggccgatatgcaca

SEQ ID NO: 3067 - DNA, 12229 bp, Unknown
  R19_24m  MAG No. k141_30071
acgatgatgtcgtcctcgccttgtgcggcgagttcggcaagcagacgggcgttcactcgcgagccgtccttcaggtgcggatggaatacaagaatcagcgttgacatgggatttcccttctataactgctaccaatgtggcctaatcaccactatcgtatgccgggaagcggaactcagtccagtccggattcaggtgcgagccgcgggatgccgcggatgagtaattgacgcgggaaaggatgctgactgatgatttggcgctgaagcttcagtgggccgcatatacgagtcctaaagcggataggatgggatatgacgcggatatcgtcggtggactgaataacgggaggcgcacatgaccatgaaccgcatgctgatgtgccgtacccatccggtaatggagttcgagtatttcgaacgcggcggatacgccctgagggcaggggagatctacgacgagtcccgaatcccgatcggcatgtatgtggacggcaaacctgagcccaccggtgagtcgattaccgggtggtggcgttctcgcggcattcccatgacccgtgacggtatgcgttccgtatttgccggttcgggtatcgcttcgacgaacgatctgctggaccgttccttgggactcagcctgtcggaccagtattgggtgcggcctctcgaccggcccgatctgacgtgggaaaaactgaactttttccacaacgattttgacgaacgacttgggcaggccttattcttcggtaattcgtcgcgcatcggcaacgtgaacaccccggatgtcaccagtgccggtgacctgccgaaacgttggattatcggtcccgatggcgtccgcagcctgatcaagggagggcgcaccggtcaggagccggacaacgagcgcatcgcctggcatacggcacgactgttcggcatcgaccatgtcgaataccgcatcggccgcgccaagggcatccgggtctccgtctgcgatgaaatgctcgaagacacgcaagagctgattcccgcagggcaggttatgcgcatcttccgacgcggcgacaacaccgaacgcaagatgatatggctggacgcatgtcagcaactcggcgtaagtcatgatacggcaaatgcggcgaccaacgattttctgttccttgattttcttctgcgcaacaccgaccggcattacaacaacttcggtctcatccgtgacgtcgaatcattcgagattcgcccggccccgatttttgacagcggcgccagcctgtggaacggcatggaccccgaagccatcaccaacgaagactacccggcgaagccgttctgggtcgacgactacggcgatgcggacaacgcctactggcagttgggacttatcgacgattgggaccgttatgatttggggatgctcgacgaggtgcctgaactgatacgggcacagctcgccaccaaccgccggctgtccgctgatgtgattgacgccatctgctccgccatgcaggagcgcatcggcatcatccgcaagcttgcacgatgatgccgcgccgggaggcaactcagtcgaggttggactgcgtgcctgcggtggcttcgttggcggcttgctcggcttgtgcctggtcgagcttggctcgtacgtcgttgagcaggccctgggcgcgcttggccaaggcctcgccgatttcccattgacgcatcgactggtcaagattgaggccgccggtttccagtgcctggacagcctgaatcagcttgtcgcgcgcctcctcatatggcatctgggcgatgagctcgcgttccttgtccgtcagggacgaggcgggggtgttcttgtcggtgggtgtggtgttctcggtcattttgttctccttatatatacggtatatatgcgtgaatgcatatggtgcattacgcggttgcggttgcggatgtggcggtggcggtaatgacgccctttttcagggtgacggtgatgtcatccccggtactgacccgcgaagcgtcatccagcacatggccatcggcggactgcaccaccgcatagcctcggttcagcgtggattgggggctgagtgcggtcagtgaggcatgggcgcgttcgacggtgagctgggcatcatccacgatacgccgcaggccgatgtcaagccgctgcagggaatcgtcgatcagccgctgatgcggttcgagcatggtatgcggttgggtcaggctcgggcggttcgcatatccctcgataagtcgaatctcgttctccacgcgcgaacggacccgcagtcgcatacggtcgatggcaccttcgatgagctgcgactgctcacgcacatccggcaccacgcgcttggccgcatcggtgggggtggaggctctaagatcggcgaccagatccagcaacgtccagtcatcctcatgcccgatggaggagattaatggtgtggtgcaggcatacgccgcacgaaccacacgctcatccgagaaaccgatgagatcctcaaacgagccgccgccacgggccacgatgatcacatccacgctcgggtcggcatcaagttgtgcaatggcctgaaccacttcggccgggcattgctcgccctgaacatgcacatggaccaccttgaaggttacggaaggccaacgaaggttcacattggtgatcacatcgccttccgcacgtgcctgaggtgcgcaaatcaggccaatagtcttcggaaactccgggagaggcagtttgtgatcggcatcgaacaggccctcgcccttaagctgcttgcgcaattcgtcgatcatggccttgaggctgccaccggctccgaccttgagaatcgtgtccccgcgcaacgacagcgaagtgcgcttcatccacaggttcggtttgccatgaatcaccacgcggtcgccctgaacgaactggctggccgcggccgcgaacctgccgaagccattgacttccatggcgatatcctcgaagtcgtcgcgcagcgtgatgtaggccgagccggcgcgacgggtattgatctgcgtgatctggccggtgacccacgcggacggccatcgttccacggcaccgtagaacttctggctcagcacacttaccggccacggattttgcgcgctggtttcagcggcgcgtgcaggcagctgatcgatagggcgaggctcattcggcagattgatggtgccctgatcaggcgcgaaagtgccttgacccggctcaaagccagccgaggccagtgaagcggcggtcggtggacggccggtagatgggtagcccattgcagtagtcatgcactccactataagtgcgttggttgatgacggtaaatatttaccgtcgcctgaaaacggtgtgatgatgaatgcgagaaccgtacgaagcgatgtatcagccgatgatggagatggtctggtgcatcagaagaaaggagtcattatggcgaagaaacgggtgctatgaagaggagtgagatatgcgttgcgctgacgattgagagtcgttagtgagctcgctgtgcgacacgcgagcagaaaacagttacgctaatcacacacttgtggttttggcggaaaatagccgaaaaccctataaatagttcgacacaccactgttgagcactagatatagtggtggggatgccgtattcttctagaggttcaaaaaacgacatcaatgtaatttcgtgtggcccacgtcgagtgcggccaaaatgcggaactcaggagagtgttcgccttataggaaaggggtgcccgatgggcgcacaggtgttggaggaaatcgtcaccgataacgagaccaaggtggccgccaaggcctccaccgtgctcgttgagaagcgtgatggtcgtgtggtcgacttcgaccccattaacatcatctctgcggtcaagtctgctttcggtgacctgaacaaggaagtcggccccgaagaagatgccatgatccgtggtttcgccaaccaagtcgaaggcgaaatcaaggggcgttacgccggccccgccaagatcgaggacatccagaacctcgtggagcacgccctcattgacgcccacctgtacgatgtggctcgcgcctacaccaactaccgtctcgacaaggacattcagcgtgccaaggccactgatgtcaacgaggccgtttcccgcttcatcaaccacgacccgaccctgattcacgagaacgcgaacaaggattccaacgtctactccacccagcgtgatctgctggccggtgccgtatccaaggccgccgcgttcaacatgctgccgccggcggtgtccaacgcccacatgaagggcgacattcacttccacgatgccgactactcgccgttcactgcccagtccaactgctccttgccgaacttctgggacatgttggccaatggcttcactcttggcaacgctccgatggcttccccgaagtccatcgccattgcggccacccagattacccagatcatgaaggacgtggcctccagccagtatggtggccagaccgccaaccgtgccgacgagcatcttgcccagtatgccaagaaggattacgagaagttcctcgaggaagctcgtgagaccatccccgacggcatgccggttgaattcgcccgtcgtcaggtcgagagcgccaagaggaacgagcccgccaagctgcatttcggttcccgcgaaccgctgccgatggacaccccgttccacaccgacgttgacgaacttgagcaggagcgtgaaatcctcgccaagattcgtacccgcaaggccatctatgatgccatgcagaccatggaataccagatcaactccaaccgtgtgtccaacggccagaccccgttcgtgactgtcggctttggtctcggcaccgactggttctcccgcgaggtgcagcgcgcgatcctgctgaaccgtattcgtggcctcggcaaggaacaccacaccgccatcttcccgaagctcgtctttactgtgcagcacggcgtgaacgccgacccgggtgacccgaactacgatttgaagcagctcgccctcgagtccgccaccaagcgcatgtacccggatgtggtgttctacgagaacatcgtcaagatcacaggctccttcaaggctccgatgggttgccgctccttcctgcagggttggatcaacccggagaccggcaaggacgaggaggatggccgtatgaacctcggcgtggtcaccgtcaatgtgccgcgtatcgccatcgaatcccacggtgacaaggctcgcttctggaagctgttcgaggagcgtatggaagtcgcccatcaggccctccagttccgcatcatgcgctgcaaggaagccaccccggtcaacgccccgaccctgttccgcttcggtgcgttcggtcgtctcggtgccaacgacaacgtggaccagctgttcaagaacgagcgtgccaccgtgtcgctcggctacatcggccttgccgagaccaccgcggtcttctacggcaagaactggattcgcgaccacggctgggatccggaaggcaaggagttcgcgctgtccatcgtcaagcgcatgaacgagctgtgcaagcagtggagcaaagcggagggctaccactattccgtgtactccactccggctgaatccctgaccgaccgcttcaaccgcatggaccgtgaaaagttcggccgtatcgaaggcgtgactgaccacgacttctacaccaactccttccactacccggtgtggttgcagcccaccccgatggagaagctcagctacgagaaggacttcccgtactacgcttccggcggcttcatcaactactgcgagtacccgtgcctgcaggacaacccgaaggcgctcgaagccgtgtgggattacgcctacaacatcggcatcggctacctgggcaccaacaccccgatcgaccactgcttcgtgtgcggcttccagggcgactttgagccgaccgaggaaggcttcaagtgcccggagtgcggtaactccaacccggacaagtgcaacgtcaccaagcgcacctgcggctacctcggcagcccggtccagcgcccgatggtgcacggccgtcacgaggagatcgcccaccgagtcaagcacatgagcggcgaaaccggtcgtgtgacgctggatgacggcaccacccgcgagtggttcgaagaggccaagtagggttattcgtgagtaggctcccctctctgaggggagctgtcagcaaagctgactgaggggagtccgaagagctattccgaagctcccctcagtcgcctacgacgacagctccccctcaaagaggggaactaatgctttccgcaaggagggaatcatgccggagttgcatacgaccaagcccgaacccaagcgccatgactttgcggccggcgagaccgggcgtggcccctccgtaccctccaacggtcttgccaacgatccgaaagccggtcaatgggatggccggcgcatgtccaagcggatgatcgccgactacaaaaccttcatcgtcaccgacggagaaggcgtgcgcaactccctttacgtctccgggtgccccttccactgcgtcgactgcttcaacgcctccatctgggacttccaagcaggccacgaatacacgcaaaaacttgaagacaagatcatcgaagacctgaaagcgccatgggtgcaaggcattacgttccttggcggcgagccattcctcaacactcccgtgctggtgccgctcgcacaacgtatccgccaggaattcggccataccaaagatatctggtcgtggaccggctacacatgggaagagctcatgcgcctcggagaaacaccagacaagcttgaattgctgcatcttatcgacatcctcgtcgacggccgctacctcaaagaccagaaggactcgctgctgcaattccgtggctccagaaaccagcgcatcctcgatgtgtctaagtccctagaagccggcgaaccggtcatctgggccaagctccacgatcaagaacgagatatccccgaaatctatttgagagaccgcgaagccggcgaaggccaacaggcctcgtagtagcaggtccggaatgccgcactcagcaatatcgtcggaactgttggggaacgcccttcccgtgagcgaaatcaccatgcccggcgtcacgttgggcaggtggtcggactaatattccagaagaagtagccgggcgaagccgtccgcaggtatctgccagccgtcccgaaacggctcatgatgcctgaaggcgcacatacccggaagtcggaattaagaggaacacatggttgacatcgtcactgacgcgagcgtaaagcccgcttcacacccgaagcccctgcgtgtgggattggacatcggttccaccaccgtcaaggccgtggtgcttgatcagtccgattccctgaaagacaccctcttctccgattaccgacgccaccacgccaacgtgcgtgccaccgtggccggcctgttggtcgacatccgtaaagagctcgtggaactaggtcgaggcgatgagccgattcgcctgtctatcaccggttccggcggtctggcgcttgctgacaatctgcatgtgcctttcattcaggaggtcatcgccgaaaccgaggcgatcgacaaggaatacccgcaggccgacgtcatcatcgagctcggcggcgaggacgccaagatcacctacctgaagcccacgcccgagcagcgtatgaatggttcgtgcgcaggcggcaccggcgcgttcatcgaccagatgtccacgctgcttgacaccgacgccgcaggcctcaacgagatggccaagagctacgagaacctgtatccgatcgcctcgcgttgcggcgtgttcgccaaaaccgatctgcagccgctgatcaacgacggcgcggccaagcctgatctcgccgcctccatcttcaccgcagtggccacgcagaccattgccggcctggctgctggccgcccgatccacggtaccgtcatcttcctcggtggcccgctgttcttcatgtccgaactgcgcgccgccttccagcgtgcccttgaaggcaaggtcgacgagttcatcgtgccgaccgacgcccacctgtatgtggcctacggttcggcattgcaggccgacatggattccgacgatcagggccaccatttcgaggcccacacctgcgatgagatcctcatgcgtctggacgagctgaagaacctgccctccaacacgcccaccatgccgccgctgttccccaccgaggccgaccgcgaggacttcaacaagcgccaccacaaggaacacatccacatcggcaccctcgaaggcgcgcatggcccgcacttcctgggcatcgacgccggttccaccaccatcaaggccacgctcgtcaatgacgaccgtgaaatcgtctggtccagctacgccaacaacgaaggcagcccgctgaccgccgccatcaacatcgtcaagaagatccaatccgagctgcccgaaggcgcatggatcgcacgctcctgcgccaccggttacggcgaaggcctcatcaccaccggcctgcacctggacgagggcgtggtggagaccatggcccactatcgtggtgctgaaatggtcagccccggcgtcaccgccgtcatcgacatcggcggccaggatatgaaatatctggccatcactgacggcgtcatcgactcgatcgccgtcaacgaagcctgctcgtccggctgcggctcgttcctgcagaccttcgccatgtccatgggcctgacgattcaggaattcacccaaaaggctctggcttccacccatccggtggacctcggttcgcgctgcaccgtgttcatgaactcctcggtcaagcaggcgcagaaggaaggcgcctccatcgaggacatcgctgccggcctatgctactccgtggtgcgcaacgccctgtacaaggtcatcaagttgcgtgattccggcgaactcggcgacactgtggtggtccagggcggtacgttcctcaacgacgccgtgctgcgcgccttcgagctgctcaccgaacgtcaggtcacccgcccgaacatcgccggcctcatgggcgcgtttggcgccgccctgaccgcccgcatgcactatcaggatgaggccgaccacttggacgtggtggttaaggccgatgggtccgaggaacagtccaaggccgagcccgcacccaagtccgagcccaaggccgcagccttcaagaagaccgagccggccaagcccgaagcccatgtcgttgtcgtggacggtgtgacccacaccgccagctccattctgaccggcgaagcgctcgacaacatgagcatgaccgccgagcgtgacgtgtgcaagctgtgccagaaccactgcaagctcaccatcaccacattctccgacggctcgcgcttcgtgaccggcaaccgctgcgaacgcggcggcgacgccaagaagaagcgttccgaccgtccgaacctgtacgactacaagtacaagcgttgcttcgcctaccgccgtttgaccgacaagaaggccactcgtggcgagatcggcattccgcgcgccctcaatatgtacgagaactacccgttctggttcacgctgctcaccacgctgggcttcaaggtgatgatctccggccgcagctcccacgagctgttcgagaccggcatcgaatccatcgcctccgaaaacatctgctatccggccaagctggtgcatggccatatcaagtggctgatcaacaagggcatcaagaccatcttctacccgtgcgtgagctacgaggagaacctcgtgcccaacacggacaatcattacaactgcccggttgtggccaactatccgctcgtcgtcggcgccaacgttcctgagctgcgtgaggacggcgtgcgctacatgcacccgtacttcaacctcgccaaccatgagctcatggttggccgcatcgtcgaagagtttgcgtgggccaacgtgacccgcgaagaggccgaaaccgcggtcaaggccgcctatgccgaagacaaggtcttcaagcacgacgtgcagcaggaaggtttgaccgcgctcgcctacatgaaggagcacaactgccgcggcatcgtgctcgccggccgcccctaccacatcgaccccgaaatcaaccacggcatccccgaaaccatctgctcgctcggcatggtggtgctctccgaggattccatctgcgaactgcagccgggggagaagctcaacctcaccgaattcctctcggaaggcgaagccgacccgcgctccaagaacgccgccggattccgccacgtgggagaccgcacagtcaccaagatgccgttgcgcgtcaccaaccagtgggcctaccactcccgtctgtacgcggccgcacacttcgtggcctcctacccgggcctcgaactcgtgcagctcaattccttcggctgtggccttgacgccatcaccaccgatcaggtggccgaaatcctggcagacaaggcggacgtgtacacgctgctgaagattgacgaggtctccaacctgggtgccgccaagattcgactgcgctcgctcaaggccgccgtcgaggaacgcgaagccaacaaggcccgcgaagccgccgcggccaaggccgtgcaaggccccaagtccaccggattccgcaagaccggctccaccgcgccaacccccggccgccagattctgcttgacagcaccatggccgccaacccgaagctcaccaaggccatgcgcgccgcctccaagcgtgccgccgaacgcgacctgcaggccgcagtcgccagcaagaacggcacttcggacggcaccaccggcgtgacgaacgccaagaacgccaagaagtccggccacaacaacgccaccatgtcccgatacgcgcatcgcgagaagttcgttaaggacatgaagaagaactatacgattgttggccctcagatgagcccgatccacatgtccttggtcgaagcggtgattcgttccggtgggtacaagttcgacatcctgaagcacgcgagccgtggcgatgtggaaaccggcctcaaatacgtgaacaacgacgcctgctacccggccatcatggtcgtcggccagctcatcgacgcgattctggaaggcaaatacgatcccgaccatgtagcgctcgccatcacccagaccggcggcatgtgccgtgcgaccaactacttcggcctgatccgcaaggctttggtcgatgccggctatccgcagattccggtcatcgccatttctacccaggggctcgaagataaccccggcttcaaggccaccctgcccctgctgcaccgtgccatcaaggcgctgattctgggcgacttgctcatgaagtgcctctaccgcgtgcgcccgtatgaggtggagaaaggttcggccaacaagctgtacgagctgtgggacaccatcgtgcgtgagaccatcgagcatcacggctattccaagaccgcagccaaggcgccgagcatcaagaagggctatctgccgtataacgtgctggccaaggagatcgtgaaatcctttgatgcattgccgctgcgcgacatcccgcgcaaggtgcgtgtcggcgtggtcggcgagattcttgtcaagtaccagccggacgcgaacaaccacgtggtcgacgtcatcgaatcccaggattgcgaggccgtggtgcccggcatcatggaattcatgaccacccgcccctacatcaccgactggaacgagaagaacctcggcatgggcggcaacaagacggtttacgccctgatgcgcaagggcctcgacctgtacaacgcgccgatcaaggccgcgctggccacatcgaacggcaagttcaagcaggacgagccgatgcccgaactggtcaagaaggctgctgaagtcacctccatcggcgtgcaggccggtgaaggctggctgctgacggccgagattctggaactcatcgaacagggttgcccgaacgtgatctgcgcgcagccgttcgcctgcctgcccaaccatgtgaccggccgcggcatgttcggcaagatccgccgcctgcatccggaagccaacatcgtctccatcgattacgatccgggtgcctccgaggcgaaccagctcaatcgtatcaagctgatgatcgccgccgccaagaaggctcacaacgccaagttcgccgaggccggcgagccgcagggcttcacctccgcggactgatttatgctctggctcgtccgcaattaaggacgagcttcgctcgcgaca

SEQ ID NO: 3068 - DNA, 19719 bp, Unknown
  R19_24m  MAG No. k141_30689
gcattcggggcagacgccgattatcctgcgggtgcgcggcctgcggtcaaccttggcagagcgtccatggtgcctcgacctgctggctgccgcagtattggcatggttcggtggtgatgactgcacacgttgtactgtagggaaccatgaaagtcgtattgcaacgagtatccgaagcgtccgtggacgtggtcaatgaattgggcacgctggatcccacgttcgagccgcagcagattggcccgggattcatgattctggtgggcgtcaccgatgaggacggcgacaagcagatcgcctggctggcccataagattctgaatctcagggtgttcgaggatgcgcagggcaagatgaaccgttcgatccaggacatcggcggcgagattctctccatctcgcagttcacgctgttcgccgacgtgcacaagggcaatcgcccgagcttcatcaaggccggcaagcccgagcgtgccgatttcatgtggatcaagttcgacgaggcgttgcgctccgggggagtgccggtgaaggaaggtcgtttcggtgcgcatatgcgggtcggactggtcaatgacgggccggtgaccatcgtcatcgacaccgagcgtgacatgcctgacggaacacgctgaattgcgatagtaatttgacatcatatcccgttccctccaatatgttactaaagcgctttagtcttctgcgggcgagggcgcatgtcgatatgtttcccatgaacgggcagcacaatgatgtggccgcacaagcggcagagataaggggagtgaacagcagatgttcctgaaacctgaacagcaactggagcggtgcaagcgcatagtgcgccagcgcgtggaccctcatatccacccatcgatcgcacagcttgcggtggagtcctttgacattcccggagagccgatgcccactgacgagttcttcgagaagctcaatcgaggtgacatcgacttcaagccgtttacgctcggcggtgaatggggcaccacatggggcacagtctggttccgcctgaccggtaccgtgccggccggctacccgaaaggcaagccgctggagctcatcctcgacctcggctggtacccgcactcctgcggcggccatatcgagggcctcgtctaccgtgccgacggcaccgccatcaaagccgtacacccgctcaactattgggtgccgttcatggatgctgagggcaacgcgcaagtgccggtcgccgaagacggcagcttcaccctgtacctcgaagccgccagcaacccgctgctgctcggcgtgcctccgttcattgagaccgaactgggcgaccatgccaccggcaagccggacgagccgtacgtattcaagtccgccgatctggccgaattcgatgaacgctacgagaactactccgtcgatctcgacgtggtgagctccctgatggaattcgccgacaaacagtcgccgcgctactggcaactcgccaaagcattgcagcgttcgctgaacgcctacgacgagcgcaaccccgaatccgtggaagccgcgcgcgcagcactcgccggcgtactggccaagccggccaatgcctcggccatgaacgtcagcgccatcggccacgcgcatatcgactccgcatggctgtggccggtgcgcgagacccgccgcaaggtggcccgcaccgtatccaacgcattggcgctgatggacgccgaccccgacttcaaatacgcgatgagctccgcccagcagtacgcctggctggaagaggatcatccggacatcttcaagcgcatgaagcggcgcatcgaagaaggccggttcatcccggtcggcggcatgtgggtggaagccgatggcatgttgcccgccggtgagtcactgatccgccagattgcatatggccgcaaatacttcaaggaacatctcggtgtggagcccaagggcgtatggctgccggacagcttcggctacaccggcgcatggccgcagatcgcccgccgtgccgggtacgaatggttcctcacgcagaagatctcgtggaacgataccaccaagttcccgcaccactcgttcatgtgggaaggcaccgacggctcgcgcatcttcacccacttcccaccggcggatacttatgccgcttggtgcaaggttcaggaactcgactacgccgagaagaacttccaggacaaggatctctccgaccgctcgcttctgctcttcggtttcggtgatggcggtggcggccccacgcgcaacatgatggagcacctgcaccgctacgagaacctcgaaggcgtctccaaggtgagcatcgaagagccgaatgacttcttcgacaaggcgcatcagcagcttgcagagaacgccggcccagaaatgcccgtctggaagggcgagctgtatctcgaactgcaccgtggcaccttgacctcgcaacaggacatgaaacgcggctgccgccaagaggaatcgctgttgcgcacggtcgaatacctgggcgcagccgccgtgttgtccgatccggagtacgtctacccgcgcgaggagctggaccgcatatggaagacgctgctgctgaaccagttccacgacatcctgcccggctcggccatcgcatgggtgcaccgcgaagcccgcgaggactatcgccgcgacctgaagcgtctcgctgaaatcgcccaagacatgtgcgccgtgctgcgcaaggccaacccgcaggccgacttgctcgccgaggcccgcatcagccagttccgcaatgacggcgcgtcttggcatgccaaccgcatcaacgaaccgaccgacgcgctttccgtactgacccagacattggacaacggccgtgtactgctggccaacggcgtactgtccgtcaccatcgaggccgacggtacaatctcgtcactgcttgacgaggagcatggccgtgaactggttccggtcggcacccgattgggccaatacgaactgttgaaggacgaacccgccgtttgggatgcctgggagatcgaacgcgaatccctgctcatggcgaatgccatgaccggatcaatcgaatcggtcgataccgaaaacggtgcggcacgagtccgcgtgcgtaccgccgacgatgacaccgtcatcaccaccaccatcacgctgcacccgggttcacacacgctcgatttccacgccgacattgactggcacgaacgtgaacgcttcctcaaagtcgatctgccgctgggtatcgtggccgaccaagcgacatacgactgccagtatggtctggtccgccgcccaatcgtcaaaaacaccgcatccgacgaagccaagtatgagagcagcacgaaccgtttcgccattatcggcgatgccggttacgccgcggccgtcatcaacggatcggtatacgggtccgatgccacgccgatcgccgggaatgccgccgaaggttgtgactcgggcaccatgttccgactgtcattgctctccgcgccgaccttccccgacccgcgcaccgatatcggctcgcacgagttcgactggtccgtggtggccaacgccacggtgggccgtgcgcttgacgccgcttgcgcactcaacgcaccgacgcttcatgacatgcccgacttagcgccgctcgcctcgatcgagtcagcaaacggcaccgtggtgttggactggataaagctggccgacgatggctccggcgacctgattgtgcgcgcctatgaggcggccggcggcagggccgatgccacgctgcacgtctgcccggcgctcgcaggcgcttcggtgcatgagaccaatgtgctggaaggcgacgatctggccgccgacctgccggtcgcgctgcaagacggcacacagaacgccgaaggcgccacactgcacttcggcccgttccagctcgccaccctgcgcatcacgcgctgaattcccgtctgacgcttctgcctccttgtaccatgaggggacagaagtatgtcgtattacggtttctccaattaccatcactcccacccctaccaccagacacagcaaaggagttgaactctccatgtttcttctgcccaatcagcagttggagcgctgcgaccgcgtcatgcagcagcgcgtcaaaccgcatatccacaccacactcgccgcatgcaccttgcgttcgttccacaatcccggcgaaccggtgccctccagcgaatttctagccaaagtgcgcaacggccaagtgcccttcgaacctttccgcgttcccggcgtctggggcaccacatggggcaccacatggttcgaggtgaacggccacatcgacatggcggcggtcaaaggacgaaaagtcgaactcatggtagacctcggctggctcgatcaccgcggccccggattccaatccgagggacttgtctatcgtgccgacggcaccgccatcaaatccgcgaacccacgcaaccactggattccactcgtctacgcggacggcagcagtaccgtagaactcgatgaacatggcgacttcaccgtctatatcgaagccgccgccaacccattcgtcgaaggccccaccccgttctcacccaccgaactcggcgaagaggccaccggcacctgtgacttcccatacacactgagtcgcatggacgtcaccatcttcaacgaagacgtgttcgcctactacatggatctggaaaccgtctcctcgctgattcgtgagctcaaggacgacgacccacgctactggcagctcgccaaagcactgcaacgctccctgaacatctacgatgaacgcgacttggaaaccgtgtcggcagcccgtgcggcgctcgccggcgtactcgccgaaccggccgcctccagcgcaatcaaacacatcgccatcggccacgcgcatatcgactccgcatggctgtggccggtgcgcgagacccgccgcaaggtggcccgtaccgtatccaacgtgctggctttgatggacgaagacccggacttcacgtatgcgatgagttccgcccaacagtacgcatggctggaagaggagcatcccgacctgttcgcacgaatgaagcggcgcatcgaagagggccgcttcatcccggtcggcggcatgtgggtggaatccgacaacatgattccttccggcgaatcattggtgcggcagatcacgttcggccgccgatatttcaaggagcatctcggcgtcgcgccgcgcggcgtctggctaccggacagtttcggctacaccggctcttggccgcagatcgcccgccgtgcaggattcgactggttcctcacgcagaagatctcgtggaacgacaccaccaagttcccgcaccactcgttcatgtgggagggcatcgatggcacgcgtattctcacgcacttcccgccctcggatacctactgctcgtggatgagcatgcacgagctgatgtattcgcagcgcaacttcctggacaaggacctctcccgtaacgcgattctgctgtacggcttcggcgatggcggtggcggccccacccgtgagatgaccgcgcgcatccgccgcgaccatgatctcgccggcgcgccgaagatcgaattcggtactcccgaccaactgttcgaccgtgtgcgtaaggatatcgtcgacgatgcgcaaggggagaccccggtgttcaagggcgaactgtaccttgaactgcaccgtgccaccctcaccgcccagcaggacatgaagcgcggctgccgccaggaggagtcgatgctgcgcgtcaccgaatacctgtgcgccgcggcccgcatcaagaacccggactatgtctatccgcgcgaagagctggaccgtatttggaaaacgctgctcctgaaccagttccacgacattctgcccggttcggccatcgcatgggtacaccgtcaggcgcggaccgaatacgcgcgtgacatcgctcggctgaacgagatcgcccttgaagccgggcgcgcgatcgcagccgtggaacccgatgacgcaaccataaccgacgccgtaatcgccccatattcccgccaagcctgtgagacgtgggtggtacgcccggcttcgagccgagccgaagcgggaaccgcatccatggctcgggtcgccgttacccatgacggcgatacgattgtgctcgacaacggccaactgcacgtgcgcattgaagccgacggcaccgtttcgtcaatcgtcgatcagcgaaccaatcgtgaactggtgcccgccggcacccgactgggccgctacgaaatgctcaaagacgaacccttccactgggacgcctgggatattcaacgcgatgcgttcctcaccgccaacgcgctcagcgaggcatcgattgcaagcgtggacgaaaccgccaacggtggggccgtcgtgcatgctgtcactcgcgcgaagggcgttgaaattcgtacgggcattgccttaaggccgggctccgccacactggacttcaccgccgatgtggactggcatgccgtcgaacagttcctcaaagtggatatgccggtcaccgtgcaagcgctgaacgcgcaatacgaatgccaatacggtctggtcgaacgccccatcaacaagaacacgcgcagcgatgatgccaaattcgaaagctgcacgcaccgcttcgtgcggatcgccgacgccgactatgccgccgctgtggtcaacgcctccacctacggctccgacgtcagccccatccacgccgatgcggcacatggcaccggccgcggcaccatggtgcggctctcgctgctgtccgcaccgctgtaccccgacccacgcaccgaccaaggcgcacactccttcgcgtggtctctggtcgctgacgccgatatgaatgcggtgctggacgaagcggcgcgacttaacagccccgtaataggggagttgcctgatatggcgccgctggtctcgctcgccgacgccaccggcgtcatcgtattggactggatcaagctcgccgatgacggttccagcgatctgatcgtgcgcctgtacgaggccgccggcggcaatgccacggccacactgcgccttgacgccgctctctccgatgccaaggccagcgtgcaggaggtgaatctcatggaggagccggagctggatgccgaactgccgcgcgcgctcgccggtgacgaaccaatgcctgccgacggtgcgatcgtttcgttggcgccattccagctcgccacgctgcgtattcgccgataagggatattgggcctaggctcgatattttgggtcgcgcccaaccgtaacggaaccggaacagaccggctctgccatacggttgggcgcggcccattattgtatgagaagagggagagcgatcccgttgggcaaatatcaatgcgacacgcgacgatgaattcgttgcgtgcatgtttcgattgtgttatgtttttactaaaccgatttagttaacaggttcgcgactggccggaagctaaaacggtttagtctcagcgatgagaactgaataaaggttgtgataccacgtcaatcaccgcgacgggtgactgtgctggagcacaacgattaggtttctccgtccacagcagggcgggatgaaaaaggaatcaaaaggaaaggaaaacatcatgttttctatgaagaagatcctcgccatcgccggtgccggtgcgatgctcgtatcggtggctgcctgtggtagcggaactgcgggggatgacggcggcaagaaggagatctccttccagacctggaacctcaagaacgacaagtacaccccgtatttcgaggcgctgatcaaggcctatgagaaggaccacccggacgtcaccgtcaagtggcttgacgccccgtccgatggttacgaagacaagctgtccagccaggctgcggccggcgaactgccggacatcgtcgacggcggcaactccatcctgtacggtcttgccaaggccggcgcgctgctcgatgtctccaagcaggctccggatgcggaaaaggactactacgaaggcgcatggaagtccgtgaccatgcagggcaatggcatcgagaagggtgcctacggcctgccgtggtatgtcaacgatggcccgacctactggaacaccgagctgatgcagaagtgcggccttgatccgaacaagattccgaccacatgggatgagtacttcgccgccggcgacaccatcgtgcagaactgcaaggatgtctacctgggcaccacgatgggttacaacaccgaagatctgatgaccgcaggcgtcaagtccttcatgaacgatgaccacagcaagtacaccttcaatgatgaggccggtgtcaagcagatcagccgcttcgttgagctgtacaagaagggcggcatcccgccggaggccctcgactcctcctggagccaggccgccgatctcttccagcgtggcaacctggtctccatggccggctccgcctactccgctgacggcttcaagcagaacgctccggacctttacaagaacctcgcagtcggcccgcgtatcagcaacgacggcaagtccgcttccgtggcctacgagatgctcggcatcagcgccaactcgaagcaccccgacgttgccattgacttcgcccgattcgtgaccaacgagaagaaccagatcgagttcgacaagaaggcctccgtgttcccgtccgccaaggggggtctggatgacgactactacaagagcatcgacgaaagcacccttgagggcaaggctctgaagatcacgctcgaccaggtcaaggacggctacggctctcgtccgtccgagttcaccgacaacaacggctccaagaacttccagcagcagatcgccctcgctatgcagggcaagcagaccgccaaggaagcccttgacaagtccgtcgagttcgcaaacgagaagctcgcacagtgagcaacgcggcactcgccgctgacaggtcggaggcccgcacggcctccgaccggcctgaaccgatgaacctcaaccacggcaagaagcagaatcgtagcttcggcaccatcattgccccctacctgtttgttctgccagcgttcgcgattgtgtttgtattcatcgtccttgcggcactcaacactttcaggcttgctttcaccaactccacactgctccgtccgggaaccttcgtcggactcgaaaacttcatcaaactgttccatgacgagtacttcctcacggcactgctgaactccacactctacgtgatctgcgtagtgccgttcatggtgatcctcccgttgatcctggcctatctggtcaagggcaactcccgcatcatgggcttcttccgcaccgccttctacatgccggtggttatgtccgccgttgtggtgggtatgatctggaccaacctgctggattccgccggtctggtcaactccgtgctcaaggcattgaagatcatctccaagccggttccattcctcaccgatcgatggggcgtgctcttcagctcgatgttcgtgacaatctggctgggcctcggctactacatggtcatctacctgaccgccctcgccaacatcgatgaatccctttacgaagccgcctccctcgacggcgctggccctgtccgccagttcatctacgtgacaatgcccggcgtgcgctccacgatgatgctcatcatgatgctgtccaccatcgccgcattccgagtcttcaacgaaatctacgtgttgaccaacggctccgcaggccccggcggcatggatatgacgatgtcgatgcttatcaagcgcgaaggcaccggtatccaggcccgcactggttacgcgagcgccatctccatcgtcgtgctcgtcatcgtcggcgtcatgctcatcgtgcagcagatcgtacaaaagcgaggtgaggactgatgaataccaacacgcataaggtcaccgtcggcaaagtcgtccagtatctgattctgattctgatgttcctgctgctcgtcggcccgttcgtctgggaactgtccctgtcgttcaagggcaagggcgacaacgtctacgccgtgcctccctacctgatgccgaagaccccgacgctggacaactacatttccgtgttcaagcaggtcccggtattccactacatgctcaacacgctggtggtctgcctgatctccatcttcggcaacgtggtcttctccacgatggccggctacgcactgggacgcctgaagtggcgtggccgcggactggtgttcaccatgttcatgggcaccatggtcatcccgatcgaaggcgtgatgatctcccagttcctgatcattcgctccatccacctgcagaacacactgctggcagtcgcactgcctggcctgtgcggcgccatcaacatcctgctcatgaccaacgccttcaaatccattccaatggaactcgaagaggcggccatggtggacggtgccaacctatggcagcggttcttccacatctgtgtaccgcaggtcaaaggcacgatgaccgttgtcggcatcttcgcattcgtcggtgcctggaacgacttcctgtggccgttgatcgcgatctccgatgaaagcaagtacaccttgaccctcggcatgaaccgactcaagggcatgttcatccaagatccgcgactgatcgccgccggtgcgctcgtctcgcttatcccgatcatcgtcttcttctgctgcttccagcgctacttcttccgtggcctggaacagggtggactcaagggctgagcggactggaaaaaggaggtactccaatgaaattcggagtcaactacacgccgtcgcatggctggttccacgcatggctcgacccggactgggacggcatcgacaatgatctcaagcagatcagcgaactgggtatggaccatgtgcgcatcttcccgatctggccgtatctgcaacctaatcgcacctggatcaacaagaagggcgtggcggatgtgcgccgcatggtgcacatcgccggcgagcacggtttggatgcctatgtggacgtgttccaagggcatctgtccagcttcgacttcctgccttcatggctggtcacctggcatgcgggcaacatgttcaccgatgcggacgccgttgcggccgagcgtgaactggtcaagaccatgaccgatgagctgtccaaggaacccgcgttcaagggtctgaccttgggcaacgaggtcaatcagctgtctgacaggccgcatcccacgaagatgagcgccacggaccggcagatcgacgcatggctggacgcgctgcttccgaccgccgccggtgaagggcacaacgcgctgtacagcgtcaacgatggcacctggttcatcgatgggcacccgttcactccggtgcagtccgccaccaagggtgatatgacagtgattcactcctgggtgttcaacggcatcgcgcaaggatacggcgccaccagtgaggagtgctcgtcgtacgcactgtacctggccgagctggccaaggcgttcggcaaggattccgagcgcccggtgtggctccaggaagtcggtgcgccggagaatgtgctggaaaccgactacacgccggaattctgccgcaagaccgttgaacgtgccatggattgccggaacctgtggggtgtgacgtggtggtgctcgcacgatgtgcccgccagcatggaagacttcccgttcttcgagcactctctgggcttgttcgacgagcaaggccagctgaagccgatcggccgtacgttcggggaactcgccgcacagtaccgttccgcattgccggctcagccgaagaccgtcgccgtggtgattgatgtggatgaggccggaaacccggtgaaccgcagtgcgctcggcccgggaggctcggtgtgcgacctgtggatgaagctgcaggtggcgggccagcgcccgaccatcatcacctcgcaggtggcggccaatcaagaggcgctcgcgcagcgtggcattctggaattgcacgctgacgaacacccctatgccgcccgttactacactgcggtttcggacccatcgttcgaaacggctgattaaaccgatatccggttgtggaatcatctactccttgttccacaaccggatattttcaattgcagtgcgcacaattgcagtgcgcagggcaaaacataagacccggtactcgccgaagagcgagaagaacgagaagacaatatacgagaagggggagcgctcaatgagcatcaactgcgccgcagtggaccgactcattgattcgatgagcttcacgcagaaagttggccagttgaaccagcgtctgctcggttggaagtccgtggaacgcaatgctgcgggacggctggtggcctcggacgagctcaagcaggagattgaccgatggggtggactcggcaccctgtacggtctattgcgagccgacccatggtctggtcaacattggggtaacggcatacgccctgaggagcggactgaggcgattgccgtggtgcagcaaactgtgctggaacgtggcgcgcacggcatcggcgtattacttagcgaagaggcgcctcacgggcatcaggcgctgggcggcacggtgctgcccaccaatctgggtttgggcgctacgtttgacccgcagggggtgcaggaagcggaagccgcggttgccgcagaactggccgccagcggcattcatatcgcattggtatccggtttggacatcgcccgtgacccacgctggggccgttgcgaggaatgcttcggcgaggatccgctgatggctgcccgcatgtgcgaggccatcgttaccggcatgcagggtgagcatcgcagcaaggtcggccacgggggagtggccgtggtgctcaagcatctggcggcgcaaggcgaggccgtgggcggccgcaacggacagtccgccgtactgggcccgcacgatcttcatgaaattcatctgccgccggtggccgccggtgtgcgcgccggtgccttgggctttatggcagcctacaacgatatcgattctgtaccttgctgcgccaacccgtggctgctcaaggattatctgcgcgaccagctcggtttcgacggcatcgtgatggccgatggcctggccgtggatcggctcgaagacatggccggctccattcccgcggcagggcgcgccgcactgctcgccggcgtggacgtctccctgtgggatgaaggattcacccgcctcgaagaatatgcggatgacgaacaggtagtggccgctgtcgacacggccttgcgccgggtgctggaactcaaagccatgttcggtctcttgcccgaagacggtgccgataccgccgcaattgccatgccgagcgccgacgccatcgcgcaggccactgcggatgggcgtgagcaggccaagcgcatggcccgcgaggcgataacgctgatcaatgatggccagtctgccgccacgctcgacgatatccgcagcgtcatagctgatgctcaagccggccctgtgattgtcgccggcccgttcgccgacgatttcggctgcttcctgggcgattacaccgcccctctgcccgccgatgaacagtcaagcgtctaccggcaattggtggcacgtctcggggaggaccgggttctcttggccgccaagccgagcgatgcgccggccgatcaatgggcgcgtgcgtcgaccgtggtattcgtatgcggcagcaccagcgaacgcagctatgacagtgaattcgacgacaatggcgcggcgaaggccgtaaccgaatacggtgccacctgcggcgaaggcgtggacttgtctgacatccgcctgccctggcgtcaggatgacatgctaggtgaagtcgcggcattgaccaccgctccaattgtttcggtggcggtgtgcggtcgcgcgcatgtactgaccgatgtgctggaacgctccgccgtgacgatctgggccggatatgccggccaatatgggccgcaggccgtagccgacgtattggttgacggagccgacatgtctggccgccttcctgtgaccttacccgcatatcccgcagccattcccgttcgatacaatgaccgccaaagtgccgcgcatgtctacaaggatgcggcggaaccgatattgcgcggcttcggctatggagccggttcgctggcggcggtgacgttcagcgagatgcacgccgatacgcaatcgcatccaggtgaagtgctggtgcaggtgacggcacatgctgacgatcacggggccgcgggtgccgtgaatctgttcgcgcatgtcagcggcggccgccgcatcccacgtttggcaatgcttgtcgattcggtatacatggacttgaacgcgggagagcgtcgcgatatcgcgttccacgtgccgtgtgatcgtctgcgggatgtcggtgacgggcaagttcaggtgacctgcacgctggatggagattcgacgcatacggtcacggcgacgctgccgggggaatattagggggcctgtatgaatgtggggtgcgaagcactggaaccgcatcacacccccggatggagcctgaaaccgcaaggcatccatcctcgcaacctgcaagtctgcgggttgtcacccgatagaggaaacaacaaaggagattatatatgtgttgctcacaaggtagtgaagggcgctcgtccatcggacgcagactcgccgccgtcgcggcgggcgtagtcgccacagcactgatgctcggatgttcgctggccatgggaacggttgcgaacgcccaggagggggattcccccgttgcggcgtcgcaggagggtaacggcaacaagcatttcatggtgtattaccgcgcatggcgtgacgtgaccatgaaaggcgtgaacaccgatttaccggatgacaattggatctccatgtacgacattccatacggcatcgatgtcgtcaatgtgttcagctacgttcccagtggccaggaagcggcggcccagccgttctatgacaagctcaagagcgattacgcgccgtatctgcatgcccgaggcatcaaactcgtacgaggtttggattacagcggtgttatggtcgacggtttcaagacgtggattgctcagcagggcaaaaacgtcgatagtgcgaccgaatcggattatgacgcgtacgccgatcatgtcatcgaaacgtacatgacctcggttggcctcgacggtcttgacatcgatatggaaactttcccggatgccgcgcaggtggcgatttccgatcaggtcatcacagccctcgccaagcgcatcgggccgaagtcggataacccggaaggcacgatgttcctttacgacaccaatggcagctacactgctccgtttaagaacgtttctgattgcttcgactatgttgcctaccagcagtacggttccgattcgaaccggacggccaaggccgctgccacctacgaacagtttatcgactcgaccaagttcgttcccggcctgaccttccccgaagagggtgacatgaataaccggtggaacgacgcgaccgaaccatacctggacagtcatttctatgatgtggcctcatactcgtacgaccacaatctcggaggcatgttcgtctacgcgctcgaccgcgacggacgcacctattccgacgatgatttggcacacatcaaaccgtcgaatctgatttggacgaagacggccatcgcacaaagccaaggcatgagtctggaaaacgccaagcaggctgccaaccacttccttgaccgtatgtcctataccaaggatattccagccgaaacacgccaaaccgtggcagcggccaccaacctgtatgaggtgaacaaggcggtgctcggcgcggattggaacgacggatacagcaacacatatgatccgacgctcgaactttccctgacctccatcgacaccacggcacttaccggtgccatagccaaggcggatgcattgctagctgacggcgcaaccgataccgatgtgcggacaacgctgaccacggccagaaacgcggcggtcactggcctgaccagcaagctgtataccggagctgacgttgtctcctggacggcatcgctcaacaccgcaatcgcagatgcaacgggcggcaagcccaagccgcaacagccaggcacaggcgaaacggacaaacctagttccggtgacgcatcacacaacaagccacagtctgcaaccggacgtctggcaagcaccggttccgatggcaccgtcgtgctatcggtcgccgtgattatgacgctcgccggtatcagcgtattcgcagtccgccgccgcggataacaccggttcgaatgaaccgaaaaacagtatttgggatacggcgcgatatgcgaagcgccgtatcccatggcccacatcggtagggacgaagtagtacgcagacggttgatctccggcgtaagccggaagaagtcaaaggagattatagatgagattgtcactaggcgatcccgctgggtgtacttctgcccgggctcaacacaggaaatggctgtgcagcggtctggccgcggtattgtcgatgaccacgctggcggcgttggccgcaccggccagcgccaccggcacaatgccatgggggtgttcctatgtttttgtcaactccttggggagttgacgtgtcgggattccggttggctgtcgtgggcgcgcttcgccctgccggtggcgtccggcgtcctttcccgtgtggcccgattcaggctacgagggctggttcctggtagaggacgccgtttttgagcatgctgtagattacgtcgcagcgtcggcgcacgaggcagatgacagcggcgttgtggtgcttgccctgttcgcgtttgcgcttgtagtaggcgatggacggcgggtgtttggcggacgcgacgaacaaggactgccacagcgcgttcctgaggcgtttgttgccccgtctggagggtctctcgcccttgatgctggtgccggactggccggtggccggagcgatgccggcgtaggcggccaggtgggccgcgcttttgaagttggcgatgtcgccgacgatgttccagcctaccaggacttcatgaagcagatcgtcgatcagggcatttacatccagtggtacgactcagccacatacccaggtggcggcgtaggctaccaagacatgttcaacggcagcaattcgccgtatgtgcaggatacggacaagggcaagatctctgattccatcttcctgaactactggttcagcggcaacatgcttaaggattcggccgctcacgccgagagtttcggcatcgatccgaaatatgcggtgtttgctggcatcgagtccggacagaagaagttcgacagtatcggcagcaatgcgggctatatgaacgtcaatctcgacgatacaggtaagccgtatgtgagccttgccgcgctcggcgccgacttcgtctcccgcgaactgggcgacgacaagaaggtctatccgaaataccagaaccaggtgttcgaccgcgaacgccgactgtggaccggctcgtccaccggcgagaagggcaccaccgacatcgccgacaattacatcgacgacggcacgagcaatgacggttggaagggcttcgcttcccagatcgccgaatgctccgtggttggcggttccatgttctctacgtcgttcgacaccggtcacggtctcgaatggcgtgatggcggcgaacggaccagcgaccagcagtggggcaacatcaacctgcaggatattctgccgacatggcagtggtggatcgatgccgactccgacccgctgcaggccgacttcgactacggtaaggactacgaggcggtaccacgcttcaagtacaccaaggtcggtggttacgaaggcggcgattcgctggtgctgagcggcaagctctccaacgacaacaccattcgcctgtacaagaccgacctggatgtcgctgccggctccaaggttgacctgacctacaacaagctcaacagcgatgattccaagttgcagcttggcctcatccttgccgacgaccccgagaccgtggtgccggtggacgtgacggacggttcggcaggcaacggctggaagaccgcgagcgtggacctgtcccagtacgcgggtaagaagatcgccacgctgggtctgatcgtcaagtggaatctcgccgactactccaccatcaagaactacttgctctacctggacaataccttcctcggcggccgctacgacgacaccctgtatgtcaagcacctgcccgccaagaccggcacgctcaagctctacgccgtgggcgcggacggctcgcgttcgctcgccaccgaagcgccgctgaacgaagcggcggccgtctccgacgtgaaagtcgaaccaggcaaggacggcaacgtcaaggtctcttggaccaatccgcaggtatccggcgagaaaaccgtgaccgtcaaatccgacaccggttcgtggcgttacgccgcgaagccgtattcccagaccgtcaaggtcgccgccgacaagagcaaagtgacgattgccaatgcgccggttgacagctcccgctatgtggtgaacgtcgataatgcaggtggcactaccgctacggcaacaggtgcatttgccgatgccgccattgagccgtatccggcttgctcggtgatctggaatggcgataatgtgacgctggcccgtcctgagacttaagactggcgctacctgtacatgaccgagaagtggatcggcgagaatggcaagcagcagcaggagaaccagctgggtgctagctacacctactcgcagaacactccgccaatcactggtattatccgtggtcgtaccacacctgcctcatacaccaggtccatcccccgccagtcatgaactgcgggtgcaggtcgaggattacagcggcaacaagaccgatccggtcaagattccgaccgccgacgaactggccaagtgcacggtcgccgaccccacccagccggatgccaagaagtccacgctgaccgcggtcgacggttcggccgtggccgacggcaaggccatccgcacggtgcaggcaacggtcaaggattcgttcggcaatccgctggccaatgccgaggtggcgtttgaactgcccgaaggcgtctcggccattggcggaaacaccaccgtcaagaccgatgccgccggcgtggcttcgctgaacgtcgtgtccacgaaggtcggcaagtacacggtgaaggccgtgctgaacggcaatgccatcggcaagggcgtcaccgtcgaattcaccaaggtcgcggtgacgccgaacaagcccggcgaccagaacaagcctggcgataccaagccgaacaagcccagccagaacgacaacaagaacaatgacaagaatggcgcttcgttgagtgccacgggttcgtcggtcattgcgattgtggcggccatggtggtgctgcttggcgcgggtgcggtggtacttcgcgctcgtagcaagacggagtagttcgtcgcaatacgggtgttgatactcgtgccataagcgggatttaggggttgcccaatgggtgcccccctaaatcccgtttgttttgtcgcaggacatatgccgagaccagtgactaaaatgctttagttatttgactaaaattattgatatcataagagttagcgcacggttgatgcatatggcccaatgcgggggtgccgtcaaccgtatcgcaatagtcgcaatgcggtcgtaaaaaggagtgttcatgagatctgctcgcgaggcatcgtcatcgtctgacggcacgcagcgtgtgagcctgaaagacatcgcagatgaa

SEQ ID NO: 3069 - DNA, 6199 bp, Unknown
  R19_24m  MAG No. k141_31084
cggtctctcaattgatctcctgcgattcatgccgtataaggaagttctcgaccaaggcgatcatcgtgtccttccccgcaggtgcggacagcgcaatcatcagcgtcatcgccgccaaggcgttaccctccacaagcaggggagtcatcgtcgctatactgttgccgttcaggaaatacacgaacagtgcggcggcacaacgtttattgccgtcggagaacgggtgatccttgacaacttgatacagcaggttcgcggctttcttctgggtggaacggtacagttcttcgcctccgaacgtctggtagagtcctgcgacgattccttggaacgaaccgttgcgttccctcccgaacagatcggattgcgtgtagaacggcatcgaccggatgaacagcatcgcgtcctcataggtcaagacccactgggactcgtcgcccttgggtatagggacattgcctgtgtcatagtcgttaagcagcacaagactcggcaaatatcgttccaagatctctgcggtgccagcaatttccggttcggtggacctcgatagcaccttgacgacggcgtgaagtgcgtcaagccgcttgcgattgatgatataaccatcaacgagatgctgcttcagaactgagttggcccatcgccgggaatagacgccttccttggatttgacgcggtatccgaccgacaggatcatatccaagttgtaatgctcgacttggtatgtcttaccgtcagatgcagttgtcgcaaattttgcgacaactgaaaatccattgagctcttccctcaatgcattgccgatatgcttgccgattgttttgatatcgcggccaaacagcaaggccaattgctttctgttaagccacaccgtatcctcgtccaccttcacagcgaggtgcacggtgtggtccgcgctttcgtactgccggtcgagaaccgggtggcaagggcggccaccaccagtatagtcaccacaccggcgcacaggatgccggcgatggaggccacatccgaagcgatgtccgcacctgcggccggcagcagtgtgccggaagcgtagtcgaagcgcgcgatgtacaggatgtagagagcgaccgtcaccaccgtctgcaatgccacgtacacggcgtagataccaaacagggcaaggattttcgcattgatgatcgtggcgcggtccagatccttgtacaggaacatgcggccggaggccacgggcgtatagatggcaccagccaccagataggccatgaccaccatcggcagcatcagcatgttctgtacgacgaactcgccagcgaggaaatccagcacactcaccgaaccggtctttccgctgactttcatgaaatcggagttgaacaggttcacggccggcagaatcagtatgaatgacggcggccggatccaaagccgcgaccgccgcacgtttcgcgacaccgagcggccggccaagctcgataaccgtgatccgcttctgttcgccggcgaattcgtccgcaagccggccgcctttgatgaacaggaatcgcccgcacaactcctgcaattcgttgagctgatggctggagatgagcatggcgatgctgcggtcgcgataccgccaaagccccacaagttcaagcaccgggcggattgggaggtgcgggcggcgggtcggacgatcacagtgtgacccgaatacgttcatgaatcatcgaatcacacggcgaggcggaccgcaagtattcgagagtcgccagttcggtcgatttcaatgacaatggtgtggacgattacgcggatatcgtggcgggtgcgcgcaaggacgccgaaaaccatccggcttacgattccggctactatcagggcggctatccgccggccgatcgcggggcgtgcaccgtacgtgattcacaacatggcgcagcggcagcgcgaaaacgactacttcgccttcaagaagcacatgacggtcaccgggcactaccgtttcgacgcttcgaaagtgctgtagagcgtactcagggcttggcggtgacggtcggagcggcgccggcattgccggctttggctccggctgcatcagctgaatcggtgccggccgcactggcgttagcactatcgtcagcgttggcaccgccggctttggccttggcatcagccgcgctcccgccatcgatcaccagtcgcagataatcgcggtcggcggacttgcggcgcggcacgaaccgactgatgatggagtttttcttgccgcggttcttcacgtacaggaagccgaacacggagaacacgaccgcgccgatgaagttgacgataagatcctccatcgtgtcgatcagaccgatgtcgaggtagccgccgaggcccaagtcttggccattgaccgtgacctgggtgatgtcgttgatgcgaatcgcatggttggtgtgcgtggggtcgagcatcaccgagctgatggaatgcacgatggcgtctttctgcatgtcgaatccgaacaactggtccatgccgaattcgaagaactcccagatcacgccgatggtcatggagaagcagaaggagacgatcgccagatacaggggcgaaagctcgaacttcacccggtcggaccggttgagcaggtcgaccagcgagaagccgatcgccgcggcgaggaagccgttcatcgtgtgcaacaccgtgtcccagaacgggaagatctcatagaacgaactgatctcgccaagaatctcggacgagaacacgaacaccagcacgatgacttccagcaccgaaggcagctcgatgcggaactgcacctggatgaacgccggcgccaacagcaacagcaacgtcaggatgcacaggaacacattttcgtagtcgccgttaaagaactggagtattgccatggcgagcaccagcatgcgcagcaccacatagaccgcgaatgagcttttgtgttcgcggatttccatgtctacggctcggctcatggtcttccagcgtacgcgccaggacggtttgcgttgtgcgtcgtgctgttgtgaccgtttccgggtcattcttgcctctttctcgcattgttctcgcgccagtctatccgaacctgcttacaggcaatcggcaagaacgggcgatagtctggccgcatgaaccgaatggaaaccgatgctgcctcgattgtggaccgcacgaatcatgcggcgatgctcgatagggccattgtgccggcggcacgccaccgcgtgtgctgattgcagtgctcgccgtgctgctgtaccgccgtatgggcatgattacaccgctgatcgtggctcatggcatgtatgacgtctccgccgccatgaccaatctgaccggaatcgccggctcctcatggtcactggtcgtagggctggcaatcatggccatgccggtggtttgggctatcgtgaggtgtgcgagataggctttgtaccggttggcagcaaatcaaaccagcgagacaacggaatgaacgaagcgaaaggaacggtatctgatgactccgattgaattgtcaacccgacgccgggttacgggactgacttcggatgagttcgccaggctgttcgtctctttgcaacgcgatgtggacggcgaagccgcgcattggagcgccacggacgtcgaatcctgggagctggtcggcccgccggtgaccgccgaacagcatcttatcgacacgttcgccgcggccaacgaattcgtggccacgcttgcggaccgtctgtaccacacgatcatgccagtcacggaagaatcggtcatcaccgcatacgctgatgacctcacattctgggcatcgcatccggaccttggcggagtgccgtgcgcattatggaacatcgccgcactgcaggcggccgaatgggcccgcaaggaaaccggcatcgcctgtgaactagacgtgcgcgaaccgctggtgtgacagctgagctcaaacatgggcgtaggtaacggcatggtttgaggactatggtgttgcgttaccggtcggaaaggatatgatggtggggcgtcatagcaaaaaagcgcgtggacagtcgaggagacatgcgcgaaagccctccgtttggagtgaaattcgcggctatctgctgacggtgatcgcggtgatgctggtcgtgttgctgggacgcaccttcgtgttcaacgtctatgtgattccatcccgtagcatggaagacacgttgcaaatcggcgaccgcgtatttgcctcgcgattgactccgagactctttgcactgcaccgtggcgacatcatcgtgttcaaagatcccgcagactggatggagggggagcagcttcccaccaatctgatgtcgataatcgacagcaatcgttacctaatcaaacgtgtcatcggtctgcccggcgataccgtcgcctgcaagggatccggggagcccatcacggtcaacggcaaacccattgatgaaagcgcttatcttaagtccggcgtgaatccaagcgacagtcctttttccgtaaccgttactgacggcaacgtgttcgtgcttggtgataatcgctccaattccagagattctcgataccatcttgacgacggcaacaatgggctagtgccatacgacgatatccaaggtgtggcgttgttccgcttctggccatttacgagaatcggcttgctcaattgagtttggcgtgaatacgcaagttgacatgtgtcgcacggcccggtgcatcctgcagtcggaccgtttccggaaccctccccccgaaatctgacgaccccctgtctcacagctatcgtacagctccgatacgggaaacgtgcgggtgattccataacgactacgtatttcaggaagtgacgtgtatcacattatggtcatgtgttcagtgctgcagataggcgaagtttattcatgagccgaatagggccggtgaagcgggctctcactgcgttcataatacggcatatcgtgaacggcgttatcatcacagtcaggccgaattaaaggaggctcggtcatggtcgccgcatccacggcattcagcccgtcaagcacgatgacggccagtttggtggaatcgactggcctgcccagtgccgctattcctgtgcacgaggatggtaacaacggcaacggcgacagtagtgccgatggcagcggcgacgacggcggcatggtcagatcgctgagcctgtggaactacttcaccatgggattcggcgcaatcatcggcaccgtatgggtgctgctggtcggtgactggatgatcgtcggcggtggcccggtcgaggcgatgatcgccttcgtgctgggcgccgtgtttctgctgccgatcggctcgacgtccggcgcggttaccatggtcgggtcgtttctgcccggagtgctggtgatgacgccgctcttctacaccggtttcgacacgattccgcagagtgccgaagaggcaagcgaaggccttgactggaagaagttcggtatggtcatctcagcttcgctgctggccgccggcttaatcatcattggcctgcaggtgctgccgttctccccggccgcgctcaaacccacatcatgggcaatcgtggcggtgtggatttgctgggtctggcattgcgttggatcagtgcacgttcacggcgcgaatagcggtgcgccggtaggtcgcgagccgttcagtcacgcgcgacccaaagcgtatcgaggtcgtcggcctcggtcgcctttttgcgcttgcgtacccactgttgcaggaaatacgccccatagcaggccacgatgaacacgagctcggccacgagcgcgaaccgttgctccacgtcgaaaatcaccaatacgaacgatgcggtgcacaggatgaacgccgcccaagacacgtacggatagccgggcgtgcggtatttgagttcgctggtggaatggccggactccagccaacggcgacggaacacgatctggcagtaggcgatggcgatccacaccaccacggcggacaggccggaaagcgccaccagcaccaggtacacagtcgaggcggcgatcacggaagacaggagcgccagcaggccaccggccatcgcggcgcacaaggcgagcatcggcacgccgcgacggttcgttttggcgaaccagcgcggaatcatgccttcgttgcccatcgaccacaccatgcgcgtggaggcgtacaggccggaattcgaggcggaaagcacggccgtgagcaccacgaa

SEQ ID NO: 3070 - DNA, 10008 bp, Unknown
  R19_24m  MAG No. k141_31427
cacatcgtcccggctcgtccccggaaacacggctatcgaaatgccgagccgcggatagaacttctgcggatagcggcccaacgccagcagtccggccaaggtggggcgcagtattccgccgacctccgattcgtcggaatcatcatggcgcaacacctgcagatccagcagcacatcgatgccgtcccggtcggcgaacacgcgcggatgctgttcgcgcacgcgcgccaacaatccggcaacaagctgcgggtcgaggtcatcggtcgtggcgccgggcacgatatccagatcgtacgtgggctgcagatgctcctcgatgagccggtcgacctcataggaggtcatgcgccggtcgccgtcgccggtgcggatgaacgagccgccgtgcggtccgagcgcggtggtgaagcagggcttgtcgcgcggcagcatctcgtcgatgcgcgcgaacaccagattcgtgccttcgaacgggcaggtgacgatcacgggccgcaccaccggcgtcatcttctcgcacgcctggctcagcgcctcctgcatggcgcgcgcgtcgaatccctcgaccggcgtgaacccgttcttttcagacaggccaaggatgatccagccgccggagccgttggagaacgcggacaacgtatcggtgatggtcgaggagatcttgcgcttgcattccttgacctcgcactgctgcgtatcgttgccgatcagacgcatgagttcgatcagctcagtcattttggcagtatagtcatcgaccatggcggcctccttgacaccattgtgccccataatccgccgcccgctcgcctccagccccgccggttcaccccaattcatccagaattcatgggttactggtcaaagtacgaatgattgccgaaaggctgtcgtatatgcgcaatagcggctgcaaactgtgttgcgccagagcgttcaagtcttttagcaaagtcgggaatgtttatcggtggccgatgtcgagaatcgataagctcacgtatggcgctagctgtggcttccggatttcgtctaagtaatacacagagcaaatcatctggcgtgatgacctgaatggagaaagagtcaagcagtttctggggaaaatccttgatattgcgcgtggccgcgcgtctgcttgtccctgtgccgcagccgcaagtacatgacgatcatccgggtcaggcagatcgaattggctccattccgattcctcaacatgtatggaggattcggggaatgcctggtccatcattatcagtctttttcggaaggcttgttgtgcggcgtcaggcagtgttcgggaggcggcttcctgtgcttcttgtaatacgttaggcgaccacaggggaagaaaaaggtcatgctcggccaaggtgagcagaacatcggtcaaggtgatggaatagatgacattggcatcaagaaacaccgacagcatcggcccgtactctccttacctccgataccgcatgcatggcttcctgcggggtcggctcgggcaggtcgtacaattcggcgtcttccccgacgccgatcatttggctcagggcgcaatccttggtgtgtttcgaggctcgcttgtattcaagcaggtcttccagccggatgcgacggtgattggacggacgtgaaaaaggaataagtcctttatcaagcagtcttatcagtgtttgccgcgaaatgccgagcattgccgccgcctgttcggtagtcagatcttgttcggtggcactgatcattacacttttgccttcggcgagaaggatggccgtctgcctgacggcgtcgcaaagctgcgaaggtaggggagtctccacgccgctggcatctttgatgaagatccgctcatcaagaaatcgtgcggtgaatgcctccaatgtcgtcatgtcgtcaatgttgatggatggaaggattgttcgtggaatggtgagtttgtcggattctgccatggtgacctcctttttatctatcacagtataaaacgtccaaagcgaccaaaacgcctaaaacgttcaaactatgcgaattgacgatggttatcgagttttcgaatatgggttgctactggccgctaacgaggtcgaggagggcggactatgttgggtggcgtgggaatcttgcgtgtgatttgatgctgccgttgctccgattgagggtatgtgggccaagggccgggtgaagttggcgtccgagccgaagggcaaacggttcggtttgttcgatgccaagggtcgcgtggtggatatcaaggcgccgatcggccccgattggaaaggcgcgaacggcgtgaagccgattcttgccgtcatggtcggcgattcattggtggccggatgtggcgtggacgaccagtcgaaaggcattatgccgctgcttgccgcgcgcgtcgcaagcgtaccggtcggccggtggcctggcgtacggtcggcaagctcggcgcgaccgcccggcgcgtgcgctaccggatgatcggcgatatcaacgaccggccggatgtgctgatcgtgtgcgtgggcggcaacgacatactcgccggccgttcggtgcgcgaatgggccgccggcctcgcgccggtgctggacgcggccaagaacaaggccggcagggtggtgcacacttttgctggtcactccatccaccactgccgcgaaaccatcggtgatgatcagcctgtcctcattgagcgactggtcagacctcttgccttggcagtgctgttctatgatgtgcatagcgattttcgattccatggttgtcagaacgcttaaaggcgtctactggctcattatgatggcagcagtgacatgcggatatggggggcgctgtctaaatgaaagtgcaacaccctttagagtggagattgtccagatagccagtgaaagggtgttgcactttcatttagacagcggggggacgattgagaagtcataattccgttacactggcaaggacgaggaattaaggtatgcgcggattatcggtattgagcagggcgttgcgatgggcgttggtgggtatgacgttttcgatgctgtccaacgcgattttcgaggggtcggtgattccttcgattctgatcgtcggactgccggcatgggtgatcgcgttccgcaagacgttcaatctggtcatcgacttcgcttctccggtatccgcatggatcgtgcagcggttcggctcgttccgttcgcttgcgaccacggagggcgtggaaggcgtactgtgcctggcggtcgcgctggtgcccaacggttggacgtattggaagtggctgctgctggccctgtcatgcctgctgctgatgaccgggcaggtcatcgacgtggcctccgaagtgttcgaggtggatgcggccggcgacgacgatgacatgctcgtcaagtacagcggctacgtcgccgtgattgccagcgtggccggtacgttgctgggccaggttgccggatcggccttggccaacgcctccatcatggccatgctgctcacctcgtcggcactgtcatttgcctgcgcgctgacgcgattccgcacccgcgagttcatgccgggattcggcaacgatggtgcgggcggcgatgacggcgacggctccgccgacgaatccacggcggccgacacgtcacacgcgccgcagcgcactccggtcacccgcttgacccgggtcagactgctgatcgcatcgctgctgcttgcgctgattccgtcgctgtgggcaagctatgcgttgctgggcatcggctcccggtacggcagcgatatgctgaccgtggtctacgcattcggcggcgtgggcagcatcgtcggatcgtttgtctacatgcggctctccgcaaaactcggcatgcgcgccgtgtccgccatcggggcaatcgccacggcgatttcccttgccgccgtactggttcccgagtttgccgcggtgtgcgtcggatggctcatcaacaacctcggctatggcctgctggcgcatggcgtgatcgtatcgcgacaactgctgctgagcggtggtgacctggccaaattcagcggccgtgccaggttcgcgtatgcgatcggcggtgccgtcggcacgtggggcggctggctcggctccgcccactggcagatactcgccgtcgtggccctggtactgtgcgccggattcatcccgttgctcaaggccatgcctggcccggtacggcactgaggtgacggatggggccggctggcatctcgtgcgccgggcgatttcggcagattttgccgtgctgatgtatgcaggtgttgacgttcggcgaggttcccagccacattgctgtgtgattgatgccgctcgataggcatgtcaggccggacacaccacggcgatgccgaatgggcgacgggccgacgacccgcatcatcgcagcagccgggttttgccatccttgacaagcagggcctgccggttggtgaggggcttgagactgagatcggcaccataccggtcgagaatgcgttgtgcggcgtggcccatggccgttgcatgatggtgggggaccacgcggaaatcagccaagcccaatcctgcgtaatcggtgagatcgggggctttgtccgtgcggtccatgagcttgatatagccgatgtcaggtgccgtgatgaccgagcccgcggactcgccgatgtacggcgtgccggcgcgcacctgctcgatgatggcccggtcggcaccggtgcggcgcaactcctgcaggagaaagaacgtgttgccgccgcccacatagatgcagtcggcctcggcgatgctacgcgtgacgcgttcggcggacccgctcggcacatcttccacatccagttgctccacctcgaaaccgaggcgttgcagcgcgtgtttgctcaacgccgagtgaaccggcccccacggttccacggcgctcgccgtcgggatgaacgcgacccgcttgccttgcggatgcggttcgacttcatgcacggcggacgaggcgttgcggaatatcgaagtcagcagcatcgtaaccataaaagccttcttcacatatcgactaggcgactatgcggcagtgtcggccttgaatatacggaagtgttcgtgcgttcgctctgggtatatccggcctgatcagcgggactcggccaatgtgatgccggccgccgtcatctgtttgcgggccgcgacaccgagctcctcgctgaccggtacggtcaggtcctcgaacacggtgacctcgaaaccgaacttcccggcatcgagcgcggtgtccttgacgcaatgcgattcggcgatgcccaccacatccacgcgactcacgccggcggccttcagcgcattggccagcgtcttgccggcggattgctcggccgcaacctcctcacgggtctggatacggtcggtattgtcctcgatgccctcaaaaccggaatatgccgccgaatactggcccttcttgaaatgatgatggataatcagcgccttgatcgccggatgcaattcggcgttcggcgtgccggccgcaccatgcttcggccacgtgtccacgaaatccggttccgccgaccagtgcgcgcccggctcgatatgccagtcctgcgtggttgcgatatacgcgtactcgctgcgatgcgcgttcacataatcggcgatccgctcggcgaccgcgttgccgccttcgactcccagttcgccgccttcacagaacgtcggctgcatatccaccacaatcagtgccttggtcatcatcattccccctattgccttggattcgttttgaatattgtctcgaactcgacgtgcgattgctctcatcatagccatgcgcggccctgtgggaaacgttcgggcttacactgcaagcagcaatcgaatacaagaaccaggggagggtgaccaagaccatgctggaccatctgacgttgcacgtgaaagacatcgaccgtagcatcacattctacaaacaggcgctcgcaccgctcggctatatcgtcaaggcgcatcatgagcccacgctcggattcggcgtggatgacggaaccctgcactccgatttctacgtgtcgccgattgacgggccggaggcggaggcttcgccggtcacgccggtcacacacatcgcgttcctggctgacagtcagcaagccgtgcaggcgttccatgcagccgcgctcgccgccggcggccgagacaacggcgctcccggtccgcgcccgtaccatcccggctattactccgcattcgtgctggacccggatggcaataacatcgaagccgtcgtggattgggctcattcgaacgagtaaaaaacatatccgtgtcgtgcctcaggcagcatcgacggcgtaggctccagtcagtcggatttgtggtcgcgacggcgttataggtcacatcacgcaagcgtgacggtgacggtctgctcggcggtttcggtgccggtccatgtgccggctctgcggttccaatccatgccgtccgcgtgcagtgcatcaatgccgtattgatgcgcctgtgtgaccagccaccctgccgtctgccagcaaagtcgagtgcggttgtcggcggacaggccgtccggcagcgtgatcgtcaacgttgtgctggccgtattggtcgcagcgccgttgttcgtgccggttttgccatttaggggcataaccgagaccttgacattcggcagtgtagcgcttatggcggcaaccaacccgtccgcgtccgaggaggttgctggctccaacgcgcacgtgacgcccgccgaccgttcgccggtcagccccgaggcccaagcgcgtgccatcgcatcccatgtggcatatagttccgggtagcctgagcgctgcacctcctgcgcggcgtcctccaccggaatcgtctcccaatccggcacctgcagcagatggtcgtagaagatgtttgtcgcataggtcatgtcggacacctgctccgccgtgccccagccttggctgggccgctgttggaacaggccgagcgaatccaagtcgccgtagtccagattcgtcagcctcgactcctgcatggccgtggcgatggccaccgtcgccgcgtgatccggcagtccgcgcgtgacggcgatgttcgcaatcagcgccgcgttctgcgcctgatcaggcgtcaaggtgcggcgggctccgtcgggcgacaccgccgcgcaatatgcttcctcggccgtgcgcgcggtctcgtgaggcgtgaatagccgtggcagcagcgtccatgccgcgatcagcgccgcaacaacaagtatgacggctgcaatcagcgcgcccgcgccatgggagcggcgtctgccgcaccgcacctgttgtcccattgcgcctccaatatttcggtgtcatggctgaccgtgaccggctggcctatgcagcatgcgagatttgtcgtgttccggctcggccgtcatcatgacagcgtggcatatccacctgaacggcggctgcgccatcacgcgactttgtgacaattcttcacgcttcctgacatccgcgcaatcagaccggggaatgatacaccgacatctctattgcaagttcgacgcagctgataagtcgattcgcaatcgtctatttgcgtttcaaggggctgatttgctcgttccgagacatccacttccgtttcgaggggctgatggccgagtagcgacagctccaaaacggcgaaatgacgttggcatgaagccattcgtacttgggttttggccaatgaccagccccttgaaacggaagtggatgtccccaaaccacgaaatcagcccctcgaaaccgagaatggcggtcgggattgctccgacaccaggggagctgctgccgctattgtgtgaaaggcgatttgtaccgggttgaaggagaggaacacatggcacaattgcagccgtactgcgcgattgagggcaatgatgatggattgcccgtcgtgttcgtgcatggcatgggtgtggaccatcgttcgctgatgatgctcgacaaggcgtttgacggcaatgattcaattcgccgtatatatctggatctgcccggtttcggccgtacgccggcattgcccgagcatgcctgcgggctgccggaaatggcggattggctgcaaacggccattgacggccttgtcggtaaagcggctccattcgccatggtcggcaactcgatgggcggtgcgcttgtccgcgaagtattggcgcgcgaacctcgccgagtggccggtatggcattgatcgcgccggtcgtggacccgcagcatgccggccggcatgtggccgaacatgtggttgcacagcccaatcccaagctgacgcactccttgccacaggaacaggtgttcgatttcattaccatgggcgtcaaccagtcattcgacgcgtggcggcgctaccaacggttcatcctgcccggcgtggcgttgtgcgaccgtgcggcatgcgaacggctggatcagcgttattggctggccgataatcccgaggaaatgctcggcacatatgcgggtccggtgctcatcgtcaccggcaagcaagaccagatcgtcggatacgaagaccagcaagccctgttgccgcactatcccaacgccaccttcgtgactctggataatgccggtcacaacgcgcacatcgaccaacccgaagccgtcatcacgctcgtgcgcgaatgggtggctcatatggcgttcgttccgttgagctgacggtctgctgacagtctgccgaagcctatatgcatatgagcgaccaatgccggttgacgcaatacgccttgcaaggtatatcgtttttcgatatagtcatatcgatgttcgcggtgtcgccaaaaacgtcggcacctgaaaggaccgggctatgaaaaactacatgaaccgatgggtgttgctcgcgttgaaagccatcgtgattctggtctggctggcctgcctatggggccaactattcgccgtaccgggattgagcggcgcgctggccggcctctgcccgagccagacgtcgatgcactggtcatgtctcattatgggcgtgctgttcctgctctgcatcgaagcggcgttcgtggccgtatggaaactgttctccttgtccggatcgggcgcgaacttgagcaggtgatttgagatgacgattcgcatcaatctcgacgtcatgatggccaaacgcaagattggcgtcggcgagctcgccgaacaaattggcatcacgcccgccaacgtgtccattctgaagaacggacgtgccaaagccgtccgcttcaccacattggacgccatctgcaaggcactcgactgccaacccggagacatcctcgaatgggaagatgtcgattgatcgacacgccaccggctcgaactcatggttcaacttgtagtctctctcaaaatcaatgatgccctatcatcctgcaagacgatagggcatcagcatgtgattatgcgcagctgatatgtcgcgttgttatcactcggcgtccgcggccggtgcctccttgggcgcggagaggaagtgctcctcgctgggcagcacggcgttcaggattacggccaccacgaacgacacggcgatgcagttcgaggcgaagatttgttggaacagtgccgggaactgcgcgaagatgtcgctcacctgggtgaagccgatgccgatggtcagcgaaagcgccgcaatcgtgatgttgcgctgcgtgaagcccgcttcggcgatcatctggaagcccgaaagaatgatgttgccgaacatcatgatcgtgcagccgccgagcaccgcctgcggcagcgagttgaacacctcggcgatggccggcacgaagctcgccagcaccagaatcagtccgccggagagaatcaccttgcggttgacgaccttggtcatggccaccaatccgatgttctgtgcgaacgaggtcagcggcaggcatccgaacaggccggatacggtggagatcaggccgtcgccggcgatggcgcccgcggtctcgcgttcggtgggcgtacggttcaggcccaccttggtcagcgcggcggtgtcacccagc

SEQ ID NO: 3071 - DNA, 5138 bp, Unknown
  R19_24m  MAG No. k141_32227
ccgtggccgaatagtccgaaggaggtgggtgatgtctgcgcacaagtacgaactgatgttcatcgccgatcctgagctggatgagcgcggtctgaagaagctgaccgagcagtatctggaactcgtcaccaaggaaggcggctctttcgatgagcccgattactggggccgtcgcaagctcgcctatgagattgccggtaagaccgaaggcaactacgtcgtggtgaagtacaccgccgagcccgctaccagcgatgagctcgaccgtgttctgaacctcaacgaatccgtgatccgtacgaagatccttcgtaagggctgaatcaagcgtttagtcagctgaacagctggtattcaaggtaagtaagaaggaccgttatggcaggcgaaaccgtcatcaccatcgtgggcaacctcactgcggatcccgagctgcgcactattggcagcggcgcgaccgtggcgagcttcacgattgcttctaccccgcgaacctggaatcgtcagaccaaccagttcgaggatggtcaggcgctgttcatgaggtgctccgcttggcgtgatctggccgaccactgcgtccagtccctgaagaagggcatgcgcgtgattgccaccggtcgcctccagcagcgttcctatcaggcacaggatggttcccagcgaaccgtcgtggagatgcagctcgatgaaatcgggccctccctgcgttacgccaccgcacaggtgactcgccagtcgtccggtcagggcggcttccagggtcgttccggtggtttccagggtggtcagcagcccaatcagggctatggcaaccagggtggccaaggtggttacaacggtggctatcagggtggtggcgctggatactcccagcagcctgccgctcccgccaacccgtccgctcctgcggccgacccgtggagcaatgccggtgcatctgatgccggtagcttctctacgttcggcgcttcctccgatttcggcggcggcgacgattccgacccggagttctgatcagtacttacctccccgctgccagcagcaatcaatatcaagatttataaggagaacatcatgtcacgtaagaggccgcaaccgccggtcaagccgttcaagaagaagccgaacccgctgaaggccgccaaggtcaccgagatcgattacaaggacgtcgcgctgctgcgcaagttcatttccgatcgcggcaagattcgttcccgtcgtatcaccggcgtgaccgtgcaggaacagcgcgagctctccaaggcgatcaagaacgcccgcgagatggccctgctgccgtacgccacctcgggtcgctgagttagggaggctttgaacaatggctgaaaccaaggttattctcaccaagaccgtgtccaacctgggccactccggtgacgttgtcgacgtgaaggccggctacgcccgcaactacctgttcccgcagggcctcgctttcgcgtggaccaagggtgctgaggctcagatcaccgctatgaagcgcgctcgtctggccaaggccgtcgctacccgcgaggacgccgtcgccgctaaggccgccatcgagggcaccaccgtcgagatcgccgccaaggtgtccgagtccggcaagctgttcggtggtatctccaacgaggccatcgccatcgctctgtccgacaaggccgcggtgaacccgaaggccatcgaggtcgagaccatcaagaccaccggcgatttccccgccaaggtggccctccacccggagatcaccgcttccttcttcgtgaaggtcgtggccgagtgagtcattccggcctagtgctggaatcacacagaccaagagtctgagcttaagcatcatcccccgtgcggttcgcgccgcatgggggatttttgtattggtgtttaaaaacgctggaaataggcgcgacacgccgagagttgcatccgcttcaaatctgagtatatttaacacctgttgcaaggaacacttcaacatctaaccaagcccctgtagctcagttggttagagcagctgactcttaatcagcgtgtccagggttcgaatccctgcgggggcacagacaaccggaatcgaaagattccggttttttgttttttccagcatcagtccgtagctggtgcggaaaggccgtcttcgcgcgtgacggccggacgtgtaaggagcggcgtcatgtctcagatattcgcgttcaccgtatccgaccccgaaggcatgcacgcccgcccagctggccggttggttgccaaagcgcgggaatatgagtcgaacatcaccgttgcctacggcggcaaatccgtggatgccaagcgtatcttcggtgttatgggacttgatgttcaacaaggtgacgaggttacggttcgggtgcagggcaacgatgaagctgtcgctgccgcagagttcgagcgattcctcaaggagcacctgtaatgagaacgatacagggcgtcggcgtatccgctggcattgctatcggcacggtccgcgtgctcgccgccgccgatcatgctgtagaacgccgcgtaatcgacgatccgcaggctgagatggatcgattccgcgcggcccgtgacatggccgtcgctcagctcaagcaactgcgtgacaacgtcgccgctgagttcggcgaaaacaaggccgagctgttcgacgtccatcggcttatgctccaggacccggactatgcgggatgcgtcgaaggtttgattgcgcaagacaaggtgaacgccgaatttgcggtgaagagcgtcgccgaacagttcgccgccatgttcgctgcgatggatagctcgaccatgcaggctcgagccgctgatgtcgaggatgtttctcgccgcgtgatgaacgtgctgcaaggcaaacgcgatagcacggcgcaggatggcagtatacaaggcgatgctgtgcagaacggtactgtgcagaacgggattgcgcagaacggcgaaagccacatcatcttcgcccaagatcttgctcccagcgagaccgcgcagctcgaccgcgctaaggttttgggcctcgtgaccgccaagggctcagcgaactcgcacaccgcgattctggcgcgcacgatgggcctgcccgccatcaccggtatcggcgacgccttcgacccgactgatgacggtcacgttgccgtaatcgacggcgccagcggtgcggtgttcgtcgacccggacgaggccacgctgaccgagtgccagcgcaggaaggccgaagctgaggaacacctgagcctactacggaagctcaaaggcaagcccaccgaaaccaagtccggtcagcgggtccacctgtacgccaacatcagccgtccctctgacgtagccgccgtgctggccaacgatgctgagggcatcggcttgttccgcagtgagttcctgtatctggaacgcgaggactggccgaccgaggaatttcagttcgatgcatacagacaagtcgcacaggagatgggcgaccgtccggtcatcatccgcacactcgacatcggcgcggacaaacaggtcgactacttcaatctggaccacgaggataaccccgcgcttggttaccgggcaatccgcatctgcctgacccgcccggagattttcaaagtccagttacgcgcattgttgcgcgcctcagcatacggcaatatcgccattatgctgcccatgatcacctcggtgcaggaggtgcgcgacgccaagcggattcttgaagaagccaaaagcgagctgcgcggcgagcacaccgacttcaacgagagtatccagatcggcgtcatgatcgagacgcctgcgtcggtcatcatggccgacgagctggccgccgaagtcgatttcttctccatcggcaccaacgacctgacccagtacacgctggcctgtgaccgtcagaccccgagtttcgaacgctttgccgacccgcattcaccagctgtgctgcgcatgatccagatgactatcgaggctgcccatcgtcatggcatctggtgcggcatctgcggcgagcttggcgcagacctgagcctgaccgatacgttcctgtgcctaggaatcgacgaactgtccgtctcgcccaccagcgtcctacccctgcgcaacgtcattcgcaaccactgagattcgaggtcgcttcggctgattccggtggctttctgggcattgcattcggctggacattcgacatcgcatcctgccggcatttcgtcgtggggcaaagtgtacaatcgccacgtttgctttcgcgcccagcgtaaatcgcgtcgccggctccgcgaacggatttccaatcacacagaatgccgtgaacagtcagccatgcctgttgcgcggcgaagagaaaagaagaagcagtggattatcctctctttaccaagctggccgccgagttcttcggcaccgccattctgatgatcttcggcaacggctccgtggccaacgtcgagctcaagaacaccaagggccaccacgccggctggctgaacatcgccatgggctatggcttcggcgtcatgttcccggtgctcatgttcggtggcgtatccggcgctcatatcaacccggccatgacccttgctcaggccatcaacggcctgttcccctggaatgaagtgctgccgtacatcgtcgcccagctgctcggcgccctgcttggccagctcatcgtctacatcacttactacccgcactaccaggagaccgaggacgccgaggcgattctgggcaccttctgcaccactgacgcggacaacaagaaggtcaactacttcctcaacgagatgttcggcacgctggtgctcgtcttcggcgcactgtgctgcctgacgctgccgtggggcaaggccgacgacgccgcatcctccatcgtggtcggcttcattgtgtggggcctcgtgacctccatgggtggcccgaccggccctggcctgaacccggcccgtgatctcatgccgcgactgctgcacgccatcctgccgattccgaacaagggtacgtcccgctggggcgaggcctggatcccggtcgtggccccgatcgtcggcgccatcatcggcgcttggctgttcgtgttcttcttcgccagctgattcgttgattgattcatatatgcaaatggcctccgctcgttttgggcg

SEQ ID NO: 3072 - DNA, 3843 bp, Unknown
  R19_24m  MAG No. k141_32387
cacccaacatttcggcaaaagtttgtgccccaagctgaatggattgcgggcgcatggaggcgatgaggcgctttgctgagaattcacagacaatttttcggtgaattgtgcccatgttcatcaatgcgcgcgataatgagaccatgccagtcatgaatgatgaagtgcccgacgagggcgattatgatgccggccgtggccgcggcgaattcgacaacatcacgcccgaggacttcatccacgggggcggttccggccacggcaacccgccgggctggctgggaccggccgacatcaaccgggcgcgtcatcagatgcccatctcatacgtggagatcgtgcccgtgcgcaccgatgagatgggccgcatctcccaggtgggctcgctgctgcgcgtatccgaggacgggtcgatcgaacgcacgctgatcaccggccgtgtgctgtaccacgagacgctgcgcgaggccatcgcccgcaatgtggccaaggacctgggcgacatcgccctgccgctgctgccggtcggactccagccattcaccgtggccgaattcttccccacgccgggactgagcgaatactacgatccgcgccagcacgccatcgccctgtgctacatggtgcccatcgccggcgactgcaagccgcaggacgagacgctggacgtggaatgggtggatcccaagagcgacgtaatgaacacgttcgtggcgcagatggtcaacggccacgggcgcatcgtgcgccaggcgctggcctgggccggaatctgacagttgttctgcttcccgctggtgggacgtgaatgtgaaggagtaattcatggcaatcgaattggccaatcatatctatcgcgatggcgaaggcgtgccggtggtgctgatgaacgcctacccggtggaccaccgcatgtgggacgtgtgcgcgaaggcgctcgccgactccgccgacctgaacgatgtgccggacttcccgatctgggcgccggatatggccggctccggcgcatccccggtgccgagcgacgccgattccggcccccgcatggcgaacggcgcctacagcgaggcgctggatcgcctggccggagcctacgtggacctgatcaaggccgccggctacgagcaggcgatctgggtcggactgtcgatgggcggctacgtggcgatggacatccagcgcctgtaccccgaaacggtggccggactggccttgtgtgacacgatggccgcgtccgacggcgtgggcggagagaaccgactgaagatggcggacgccgccgaacagacgaactcggtcgaaccggtcatgcacttcgcgcaaccggccgatggcgattccaccgtcaagaagactcctgaattcatcgcgaccatgaccggctggatcaacgaacagaacccggctggtctggcctggcgtcagcgcatgacctatggccggcccgaactgggggcggtgccggaaacgatcagcgcaccgagcctggtggtgtccggcgaactggacccctccagcaatccgagtgtgatgcgtccgctcgccgagcgaatcgccggcgccgaattcatcgacattccggactgtggccatttcagtgccgtcgaacatccggataccgtggcgcgagcactgctctcgctcgtcaggcgcgtgcagaacgcgcagaagaacgcataggagacctcgatgggcactgacattcatttttcgcccctggcgctgacccatgcgctgccgttcctgccgctcgcgcaaggtgacatcgactatcaggtggaccggcgcggtgaacccggtctgatcgacgagctgttggccgagccgaccaccaaagtcgtgcttacgcgcggcggacttgtcgccgtaccgcgcggccaaggcgagctcgtggactatgagaacgtgaaaatgcggctcgccacgttgccgggcgcctatgtgtccgccgaactggcacgctaccccgaaacggtcgccatgttcctcggctcctatgtcggggcgcgcggcgaatccgtggtcgccgtggatatcacgcgcgtgccggaagccggtgttcccggtgttggcgggattgctggtgtttccggtgctgccggcggcgtgctcggcgcccaggattccggcaccgtggacggcgcactgggcaagaacggcatcagcggaggtgctgccgccggaatacggcagccgggaaacgccaagggcaatggcggcgtagccgcagccaaaatctccgggccgctcggtgtaccggattcggcagggcaaggtgcggacgatgccttcgatgattcggtcggcgcgcccgtacagcccttggccccgaagcccacgctgctgcaacaggccgtgacccggttcgactgggtggacctgcgcggattcgcccctcacgccaacgcgcgcgaggctgggcaagccaccagtgccatcaccttaagcatctggcacagccgccagcggttctgccccacctgtggcgcggcggtccggccggcgctcgccggatgggcgcagcgatgcaccaacgaggcggacggcaaccgtgtgctgttcccgcgcgtggagccggcggtcatcaccgccatcgtggacgggcacgatcgtctgctgctgcaacacaacgcggcatggaaggattcgaggctgtattcggtgtccgccggatttgtggaggcgggggagaaccttgaacacgcctgccgccgcgaggccatggaagagaccggcatcaagctcggcgaggtacggtacctgggctcgcagccgtggccgttcccggcttcgctgatgatggcgttcaaggcacatgcgatcaccaccgacgtgcatgtggacggcgaggagaccatgaccgcgcgatgggtcacacgcgacgaatacacggccgagctcatcgccggccgtatggcggcgccgggccgcgccaccatcgcccgctacatgattgaggaatggctcggtcgcgagctgtgacggaccgcgaagataggttaggcttatgactatgagtgatgacaacgaaaacgaacagccgctgaacctcgacattcccgaccacctcgaatactccgaggagcatgcttgggtggaccgttcggtcgaccccgcaatcatcggcataaccgaatacgccgccgaccagcttggcgaacttgtgttcgtggatttgcctgagcctggcgcccgtgtggaggccggcgacgagatcgtggagcttgaatcctccaaggccgtccagccgttgatcagccccgtggcgggtacggtcaagtatgtgaaccgtgacgtggcggacgacccgtccgtggtcaacggcgatccgtacggcgaaggctggctgctgaaggtcgagcttgacgacgatgagccggagctgctgagcgccgacgaatacgcgaaggtcgtgcggtagttccacccatagctcccctccctgaggggagccagtatgtggcatcaaacctatatgcatcgtgcctcttatggagggaagccaagaaaatgaggcggatggcctatattggtgtctatgagcagcccacgcgaggattttgaggcggcaggcaagcgactgccttgggatgctgctgctcgcaatgcagcgctgtccgccaccgcgccagtctctgacgtcaaggcatccgccaatggcgccgacaatgccagcaatgccagcaatgctgaacattccgaggacatgcccaccgtgccgattcccgcacgcaaggctgccacgacgttcgacaccccctccaagcgtgagcgcatcgaggtcaagccgccgatcacccgattcatacgtcgtgccatcacccgcgtgttcggcgtatg

SEQ ID NO: 3073 - DNA, 2598 bp, Unknown
  R19_24m  MAG No. k141_32408
cgaggagggacagcaggtcggcgagaagcccatcgaactcgacaagcaggtgctggagcgcatctaccagttcaccggcgacaacgtgaacctgggcgaatggtcaagctcgaacctgaacgtgttcatcccggtcatcgaaaaagcggtggagcatatcgccgccgaaacacgcacccccggccattacctgctgacgaacgcggaggttccggccaccggctacgaggtcgccgaagccggcctcgtatccaagaccatcgaacgcatcagcttcctgaaatcccccatccgcgacatctgcagcatcgccatgcgctacgagaacgacgtggctgaggcggacatcatcgccgactccaaggtgcagttcgcgaccccgcagtatcgcagcgaaaccctgatggcggacgcgatgctcaaatacaagcagctcggcttcccgatccaatgggtcgcggagcagatgggccaaagctcggacgaggtgcagcgcatcatgcgcatgcgcgccgacgagatggccgaccccgaactcgaatcgttgaaccgtgccctgcagatcggaggcgctgatggcggtcgaatctcaggtgctggcctacagtcagaaacggctggcgaccttggagctggcggcggacagagccgcacgcagaacatggaacagggtcgacgccaataacatccaggcgtcgtggaagtcgataagccgcgacttcctcaccctgttctccaccatccaaaccaagtcggcggagacagccatcgatgcgagcggcatgatgctcgccgaacagggcgtgtacgtcactccccatgctttggctaacccgaacgcattcgcaggctgggctccgtccggcctcgacatcgcctcctacttccaatcccccgtgttcgccgccctgcacgcgatacgcaccggcagctccccgttggaggcattggaatatgggcgcaacctgctggtcatgcttacctctctggcggtcatggacaccgcccgccaggcggaatcactggacatcaccagccgtcccaaggtcggctacgtgcgtgtcgagtccgccatctgctgcgaccgatgcatgctgctggccggcaagtggttccgcttcaacgaggggttcctgcgccacccgcactgccacggccgccacgtgccctgcagccagggcatggccaaacaacaggggtggatcagcgaccccatggagggtttcaaaagcctctcccgtgaggagcaggacaagcgcttcggcgcgaattacgcgcaggccatccgcgatggcgccgacatctaccaggtcgtcaactcgaaacgcggcatgcaaagggtgggcaaaggctatacggcgctgaccaccagcgagggcaccacacgatacgggtgggccagcatgcaatacgcccagcagtccggccggaggatgaaacgccgcctgtccatcgacggcatctactcgctgaccggaggcgaccgggagaagaccatctctgcgttgaaggccaacggctactacgtggacaacgactggcgcggcaaggtgcccgagatccgcaaaagcatgtggctgcacgacaacacgtaccggcaggggcgcgtcgaactattgaccgccgccgagaagcgcgttcagaccgcgaagctccgctacgaggccgtattggagggccgcaaccccaacgatggccgcatgcccctcacccccgaaatcgccgcccaatgcgaacgcgaataccgccgatgggtcacctccggcggacagattttccagcaatgatccagcgaatcgaaaggaagaacatggatcccgcaaaccagaaccagcagacaggcgacaacgagtccaagaagccggagaacaccggcggcgaggattggcagtcgaagttcgaaggacagcggaaagtcaaccgcgacctcgaaaagaaactgaacgaagcctacgccaaggccgacaaggtcgacgaactcgaaaaacagatcgccgccctgcagggcaaggaagccgaatacgaggccgcccggaaggaacaggccgtcaaggacgaggcccttgccgccgccaaccagcgcatcctcaaggccgaagtccgcgccgcagccagcggcaagctcgccgacccggccgacgccctgcgctacctcgacctgtccaagttcaccgtcacggatgacggaagcgtggacagccaggccatcgccaattcgatcggcgaactgctggaacagaaaccttatctcgggaaagccgagcaagcaccctcgggtgcgaacatcacgccgcccagcggaacacgggacggcgaccgccatcagggtcagctcacccgagacgacctgaaaaccatgagccccgcagaaatcgtcaaagcccaacaggacgggcgactgaaggacctgctcggagccaactaacggaaggaggccttaaatggccatcaccaatttcattcccgaactgtggagcgccaacatcctgctggaactccagaagaacctcgtctacggttccgccgtgaaccgcgactacgagggcgacatcgccaactacggcgacaccgtgcacatcaccggcatcgcgcacatca

SEQ ID NO: 3074 - DNA, 18314 bp, Unknown
  R19_24m  MAG No. k141_33290
ccatcatcattgtggggtcacagcggccagatgaccgccgaagcgttcggtcggcttgcatcatggtcgagttttaacatcgttgtgggacgccacgacgaatttgcccattccagagctgccatcccacaaaagcgtgggacaacagctaagtcaatcgttttacatttcccccatcccacacactcaaactggaaaccccggaaagacgccattcctgccacacccgtcacagccattacccgaggggccgtgggacgccacgcaaaaatcggcaaaacatgcgtagcgtcccacacccattggcgcaaatccacgctcaatgcaccgacaacacccccaatcgaccactatgacacatttccctccacaatcgaacactagtcattcacgaaatccatcactacgaggcatcgcaatcgaacggcatgcaatatcaagcacacaccacaacaacaggtcgcacaaatattgcctttacatcagtccgtttcggacatcatggtcacagcaggctctgcgccaactcttcaagagacatggctactacatgaaactcgaatacggcaccgcgcgaagcaagcgccctcgccacgttgaaagcgaattcagcacgagcatcctcgttagcgatacttgctgccgtggcgacgaagaccagccatctccgcccgaccagcacaccccttttctcttggtcacggcgccattgagtcttactcgtacgatgatgatcgccatcatattcaacagcgaccttgaactccggccacgctaagtccaacgttatgggagctccagatgcaaaagccgcgtccggcaccacatagttcgcaaccggccgtggaatcccatgcgctaccagagagagtcgttcttctgattctttgggcgaatcagcaccaggtgatatcagaggcaatgctcgaacgcaggacgggcgccctctgaatcgggtaaattgctccacgaacttcaccagatcctgatagattgcagcagcatcacgatccttggccaatactggctgtttgctcgtagcagcgatgacggcatccccgagcacaatcagggactcaaaagaaacatacggggcaagttgagcccatacgtgaaacaggtccagcgcaaacacgtgttggttcatttccacattgtcggctttagccgcatgtttccaaatatgcgtttgcagtggtgcatggcgtgtacgaaaccgcctgctcttaacgctggatacagtgtgcagcttggccgagtcgaggtcgcaatcggcgggaatcggtacggattgcagagcgagggaagtggtcatgccgaaaagcagcttcttgcccgcccgtttcgcttcctcagtgcagcgtgcgaccatgtcgcgtctgcgctgggcgaggctttcgctcatggtcggtgtcgctgcagaatcatgtgcaccactgttcggcgatgacgagtcgcgagaagtcgggtatttcgagtcagtagaaaatgatcccgcaaattcgggcggaacaaaaactgcctccgattcttccggaggctgatcgtatatagagcctggcagagctccatagttggtgatgccgtcggtcatcctgttcatgacaccaccatatgggtagtgggtgcggaaacggaagccgatccgaggtatgtggtcctagcttcacttacgcacattcattgtggataaccatgtggacacctcacttatacacatagtcatccacctcttcaaccccgatttgacacactaactgtatctgatatgattacagtatcataactgtacacatcatagttacagtatcgactcggtaaggaggtcgtttcatgaacggcgaccattcactggcagtgcacgcattggtctaccttgaccatcgcgccacacacctgcccagtcagatcctggccgagaacatatgcaccaatgcggcgcgcgtgcgcaaagtaatgcgaccgctcgcctcagccggactcatcgccactaaagagggtgctgaaggcgggtacgctctggcccggcccgccgccgaaatcactttgcgcgcggtagcggaagccaccggcaccacttttgtgaaagtgaactggacaccgggcgacgtacacgaggactgtctggtgtcatcttcaatgggcgcagtgatgaacgacatctatgccgggctcaaccgcacttgcctcgaacaactcgaacacaccaccatccacgacatcaccgaacagatattcagcgagcgcaaaggctaataatcccgcgcgtttcccctagccagcatcagtcgataacgcttcggcagtcaaagaagaaaacagacgccgcacggcacacaacacatcagcacaacgcactcttatcactcgaatacgtaaggaagtaaccatgtccatcagcacacccaatgccatcagcacacccagcacctcccccactatcaccaccgacgccctgatcattggattcggcaagggcggcaaaaccttggctgccaagctcagtgcagccggccgcaaggtcgtcgtcgccgaggcaagcgccgacatgtacggcggcacctgcatcaatatcggatgcttgccgtccaagtcactgattttgtccgccgaacaggcgcggcgggatggcgcgaacagtactcccgaaacccgcgaagcagcgttcgaggctgctatcaaggagaagcgccgcgtcacttcgatgctgcgcgacaagaactatcacaagctcgccgaccaagacaacatcaccgtaatcaccggccgcgctcacttcaccggccctcatagcgtggaaatcgccaccgctgagggcccggtcgccgtgaccgccagcaagatcttcatcaataccggtgccacgccgcgcattccggatattcccggtatccacactacgcccggcgtctacaccagcactggactgatggatctcgacgatatgccgcagcgactggtgattatcggttcaggattcattggacttgagtttgcctcgatgtttgccgatttcggcacggcggttaccgtgctgcagcacaatgccgagttcctgccgcgcgaggatgcggatgtggcggccgcgattcgcgcacagttggaagcgcagggcgtcaagttcctgttcaacgcggataccaaggccatcgcgcctgctgctgacggcggcgtcaggttgtccgttgcggtgaagggtatggctcgcggcgcatcgcaagcttgcgattccacccccgccggcaccgggaacgctcataccgatatcaccggtgccaccgacgccaccggcgccaccgacactacaacaaccaccagccccactagcaacccgaccgatcacgccacgatgtcacacgttcaaacgaaaccatcagacgatggcgagccgcggttcgccgagccggctgaagcccgattctgcctgaccaccgacgcggtactggtggccaccggacgtacgccgaacgtcgagggactgcatcttgaggcagctggcgtggagctcaccgaacgcggtgccgtgaaagtcgacgagcttctgcgcaccacagcagccgacatttgggctctgggcgatgtgaacggcggcccgcagcacacgtacatttcgctggatgactatcgcgtggtgtggtcgcagctcaatggttccgaccgtccgtacacggtgaaggaccgcaagcatgtgccgtcgagcacattcctcgccacgccttactctcgcgtgggattgaatgagcgcgaggcgaaggcggccggattggattatgtggtcaagcgattgccggtggccgctgtgccgaaggcccaggtaatgcggcgaccggatggtctgatgaaggcgattgtggaacgcaatactggccgcattctgggtgcgatgctgctttccgtcgagtcgcacgaggtgatcaatatcgtcaagttggcgatggatcttgacgcgccggccagcacgttgcgcgatatggtgttcacgcatccgacgattgccgaggcactgaacgacttgttcgcgtagtttgttcgcatagcacgcccgcgcagcatgacccgcgtagcgcagcccgcaacagactcccctaatgcgcgcgaaggtcctcatcgacgtaaaccgatgaggaccttcgcgctgtcgtcatgatccgtatgtgacagcaatcacgtccgaaccagccgttacttcaagccgagcttacggtccagaatgtcggaggcatccaatcccaagcggcgtcggatgaaccagccaagaccgagcggcaggccgggagccaaggccatgccgcctggaccgagtgccatggttttggagttgcctgcgataagcatggtgcccttggatgcggccgtggaggtcgaaccatcgctgtccgcctctggtttgaggatttcgatgttgccgtcactggttttgtacagtcccttattctcattccagataccggatgcgccattgttgccggcctcacccgcagagaggaaatgtcttgtttttcttgtgagcgctcacctattcacgcgcgatggcatgtttttcaagcaaagtcaataggtgtgatgttattcacactcttcactacgttgttttgcctcgcactgggcaaccccacttcagcaagagattgcacagcttgcgttagggtggagaacatgactatcacagtatccacagatgggtccgcattagggaatccaaacgggccaatgggctgggcctgggccgatcatgagcagaacgccggcggcaagcccggccataagcacgacgaccatggttatgatgcgggcggcgcgaccaacggcaccaatcagattggtgagctgtgcgcagtgctggaagctttgcgagcgcacccgggccctgagccattgctcatcgaatcggattcgcagtacgccatcaattgctcgaccaagtgggtcaaaggctggaagaagaacggctggaaaaattcgcagaaaaagcctgtgaagaacaaagagcttattcaggcgatcgaccgtgagatctcacaacgccctggcccggtggatttccgatgggtcaaaggtcacgccggcaacgagggcaatgagttggtcgatgaactggcacgcacctatgcgggcgattgccgttcgggtgcgcgcgacggctatctgccgattgaaggctggcagtcgctactgggctccgaatacgcacatggcaccgatgtgcctccagacgtgcagttggtgctggatggcaaggcggatgcggcaagtttgcgcaagccggctgcggcgacggattcgacggatgccacaaggccagagaccaagtcttcgtcacccttagcgacacaatcagcgcaacctgtacaatcagcgcaccccgtacaccccgcaaagccaagcggactgacggtatccggtacgctgaccttctcccccgcgccgaaaacgagcccgtatttcaacgggcagccgatgccgatcaaaggcagcatcgaaatcgaaggctatgtggacggcgacggcaacctgaccatcgccaacgcaccattcgtacgacactaacacccaaacacacgaatatgtaccgcaatcggacacgatgacacaaaatcgctcattcgcgttaggataggagataaggcttcacgccgttgatccatgcggcggaggcaaggatggcaaaggagaaaccatggataaggcacagcaggatgcgctgaagaaggcggccggcatcgaagccgccaaactcgttgaaaacggcatgatcgcaggcctcggcactggttcgaccgtgaagttcctggtggacgagctcggccgccgtcatcaggaggaaggtcttgagttcactggcgtaaccacgtctcgccgcacgcaggtccaggctgaaagctacggcatcaagatcgtggacatcgacgacgtggaccacatcgacgtgaccattgacggcgccgacgaagtcgacaagaacttcaacggtatcaagggcggtggcgctgctctgctgtgggagaagatcgtggccaccaactccaaccagatcgtgtggattgtggacgagtccaaggttgtggacaccatcggcaagttcccgctgccggtcgaggtcattccgttcggcgctggccacgtcatcaagaagttcgaggaccgcggctacaagccggtgcttcgtcttgacgccgatggcaaggaagtgcgcaccgacgagaacaacttcgtggtggacctgcacctggagcgcatcgatcacccgcaggagctggccgaagacctcatcaacacggtcggcgtggtggagcacggcctgttcctcaacatggtcgacaaggtcatcgtcggcgacccgaacggcccgcgcgtgttgaccaacgccaacaagtgatcgtctcacatcactgaacttttccaagcccgcatctgtacatcgcaggtgcgggctttactgttgcccgaacaaggcaaaggagccaaaaagagaaaccccgcgaccataacgatcacggggtttctaatgccttgattgcaggtaagactacttacgctggtggcgggtcttacgcagcagtttgcggtgcttcttcttgctcatccgcttgcggcgcttcttgatgacagaacccatctgaagcctccatttcgattaatcgtaaaagttgcaacttgcaccataatacacgtgttgccagacagaggaaaccagtatgttgtcgatagtccgcatatgccctgaacgcagttggggcatccacatcagcaatgtggatgccccaacgttcataagtttgtgcagcagctgacagccgatactagatactacatcgggaacttctggtagaagcgatcgaccgcttccttggtgccggtagcttggaagaccacggtatcgttctgccagatggcagcggcgttcttgctgttggaggcatcggccttcaccacgtacgcgcccgtgacgttgccggaaaccttgacgttgccggatgccgactcatcgccggtctgcgcagcgaccaacgcatcgtactgggtcttggcattgtccgccgacgaccactgcgcggcgaccagcgtgacatccttggcggcatcaccagtggagtaggtcagagtgtactcctcgagcggcgacgcggaattccacgtcgtggaggcatccgccttggtacgcgcgtaattcagcacgctgtccggcatggccttcaacagctcactggcatcatccggcaaagctgtggcgtcgatggtcggcttgatcggctcggatgattcggttttctgctggctgttttgggtggtagtggaggtgccatcattcttctggatggcccaacccggccacacaaaggccgaaagcactgccaggataatcacaacagctgcggcaaccaccactgcaatcaacttgccatgggattgtgtggtcgaggagttctcactattagtcataccccgattctctcacagccgcgtgacgctagacggccgtaatcttagtcgttgtgcgcaagccgcgtgaaactcttgtgaacggtaaaaatttaccgtccgctggtgtttgggttagggtgagaccatggcgaaatcaagtgtgcagtatgtatgttccgaatgcggttggaacgggccgaagtggtacggccgttgccccgagtgtggtcagtggggcacggtcgaggaatttcacgaggctcggccggcggcaggctctcgcacggccgctcccggccgaacatcacgcacgcagtcggttacgattgccgacaacgccagatctgcagcccgtccgattaccgaagtgggcacggaaagcgtcgagcggctcggtaccgggttttccgaattcgaccgtgtgctcggcggtggcgtggtgccgggttcagtgacgctgatagcgggcgaaccgggtatcggcaagtcgacattgctgttgcagacggccggcaatatcgcgcgcgttgtggcgggagacagtacattccgaggagccggtcagcggtctgcccaacagtcgggccgggcgcagggtggcacatcaaacacggtgtcggtacagggcaacgcaccgtcggtacatgccaataccgtgctgtacatttccggcgaggaatcacaggcgcaggttcgtttgcgcgcttcccgcatcaacgcggtggagccgaacttgttactggcctccaccaccgatctgtccacagtattggggctgatcgaacagaacaagccggccttggccattgtggattcggcgcaaaccatcgtctcgcaggaggtcgatggcatttccggcggttcgactcaggtgcgcgaagtggcaagcgcgctgatagataccgctaagacgcttgacattccggtatttctggttggtcatgtgaccaaggacggttcgattgcaggcccgcgcacattggagcatctggtcgatgtggtctgccaattcgaaggcgacagcgagaccgcgctgagaatgttgcgagcggtgaagaatcgttttggtccgaccgatgaagtcggctgtttcgacatgagcggtgagggcatcgaagaggtcaccgatcccgccggattgttcctgtctggagacggccctgatgcggccaacgcggcacccatggaaggcacctgtgtgacgttcacattggatgggcatcgcagtctgcctatcgaagtacaggctctggtcaccacgtcggtgctgcccacacctcgacgtgcggtcaatggcgtggaccccagccgtatcgccatgctggtcgcggtgctctaccgtcacagcaagctcaacctgctgtccaacgacctgtatatctccactattgccgggggccaggccaaggagcccggttccgatttggcgatagtggcggcactggcgagcgccgccacgtcaaaacccattgcgcgagccacgtgcgccattggcgagatttccctgaccggtcaggtgcgcccggtaccgcgtatggaatatcgccttcgcgaggccgcgcgccttggctttacgacggcagtcattcctccgctgcgcaagccggtgcatgtcgagggacttcggctggtggagtccaacacattgtccgacgccttagatgccttgggagtgcgtaaatagccctgagatatgcctcaggcggtaagacgcttggtctcttcgacgttgcgcttgagttcgtcaacgagttggtcgggaccatcaaacttgacctgcgggcgcaggaaaccgacgaattcaacgcgaaccttatggtcgtacagatcaatccactcatcggtgatgcaataggactccaccacgcgttcgttgagtcctgttttctcgctgaaggtgggtttggtgccaatggagatggcggcaggccagcggttctcaccatctaccagccaaccggcatagacgccgtcgaccggaatgtagcctgcaatgtcggagccaagattggcggtggggaatccgatggtgcggccgcgctcctcaccgtgtaccacttcgccttcgatggcgtgcggagcacccagaatggcgttggcatcctggattcggccatgagccagcaggtagcgcacattggtggagctccaggcgcgcattgccttggcctggttcttcttgctccatgcgcggcgctcggccttggtggcattggccagcgggtcgacgggctctccccattcgctcggggcttccggcttgaaatcgcgcggaatgcgcacttcacccgggccacggtcatcgaccacatcaagttcgaatacaccggtggcggcggcaagattggcgatatgcttcacatcaccttctcgccccttgcccatggcggcatcctgcccgaggaccagcgtacgcatgcccagcttgccggtgagtctgccaaggaagaaaatgtatgacatgtctgcgaaggccagcgtgtagtgcaccaccaacacatggtccacgccgaactgttccatgcggtgcagtcgatcatccacactggtcaaggcttcggcatccacgttctgcaccgcgggttcctcgccatggtgcgaggcggcccagccgtgcacgaatgcggggcgcgggtcaaacagaatcaccacggaaaaagcatcatgctggtgcgcgagttccaccacacgcttgatcaccgcctgatgtcccaagtgcatgccatcaaatgcgcccaatgtcaccacggccttcttgtcgttactgaacgagggccattcaatcgaaccttcggcgtcaggggtcaggtgcgtgatatccatcagtgtgctgttccttttatccgtgcgatgttattcatgcaatataggcgttgttgtgcgcggcctgtatcaagctgcacttttcaccgcgtctactttacgcgagggggaatacggtgaccggcttggcctgatgagcgttggcacgctcgataatcgccgccacatcatgcgtttgcggcacaatggcggcagtgggctcgctgattgtacgctcgatacggcggccgaagcgcaattcgctggcttcctcaggtgtgatgtcaagcgccggcatcgcgcctcgagcggcctgttccatggtgagggcatggtcaagcagccagttgcggcgctcgtcaccggcaagaccttcaggagtgttcaatacgcacttgttgcgcgtgacggtttgcccttcccgattagtgaacgtcttctgatcggtatgtgcggtgacggtatgggttcgcgtgtcaagcatcgcctcagaggcgataagtccgctggtatcgtccggcaacgcgaatcggccgactcgcgtacggcgcaaacgggtcaggtatccgccgacgccaagttcattgccgaggtcgcgggcgagcgcgcggatataggtgcccgatgaacagctgacccgcacgtcaatatcaagtgcgggaatcgttcccgtgttcgcgtcttcccgcaatggttcagcggcctgctcccctgctacgaatccgctgcggatatccagcacggtgaattcgctgatggtcaccaggcggggtttgagttccacatccttgccttcgcgagccaagtcgtaggcacgctggccgttgattttgatggcggagaacgtattgggtacttgttcgatatcgccggtgaaattggtggcgatggtgcgagtgagcaggttttgccatgaggcagttggtgacgccgttggttcgccgctctggccgccctcagtcagctgcgctgacagcgtttgccagcgggagcgggcttcatcatcgacaagcgcctcgccttcggcatcgtcggtagtggtgcgcaggccgaggcgtatggtggcctcgtaggttttgtcatgcgccacgatggcgttgagcagtcgcgtggcgtggccgaaggcgatgaccagcgtgccagtggccatggggtcaagggtgccggcgtgaccgaccttcttgatgtgcaacgcgccgcgcacggcggcgacggcgtcgaaactggtcacgccttgcggcttgtcgatgatgagtaggccgctgggtgttgtatgaagcacactactcctcgtcagactcgaactcatcgccctcggcttcggcctcgtcgtcgtgcttgtacggatcggcgtcgccggcgtactgggcggtggcgcgggcgcgggcgagttcttcgtcacgcttcttggccacggcgagaatgtcttcgatctcgtgagcctcgccgggcacttcatcgaacacgaattggagctgcggagtcaggcgcaggccagccttgtggcccaccagagaacgcaggtgacccttggcctgatcgagcgcctgctgggcgcgcttgcgttcgccttcctcgtggccttcgtggccgagctgggtccagtagaccttggcgatctgcagatcgttggtcacacgaacttcggtgacggtgatgctggcgagtcgcttgtcatgcagttcgcgctcaatggaggaggcgacgacacgctgaatcaaggccgcaatacgtgcggcgcgcgggttggttcctgccataggaatttccttttctagacttgagccccctctgacgaggggctgccgaacgcagtgaggctgggggagagaaaatcatggaactaccatgtctctcccccagtcagcctgcggctgacagcccactcgtcagagagggcttaacaatgactacttgcgctcgacttcctgcatctcgaaggtctcgatgatgtcgccgagttcaatgtcgttgaaggtgccgaggttgataccagcctcgtagccttccttgacggactgaacgtcgtccttgaagcgacgcagcgaggagatctcgaggtcgttgaccgtggccacgccgttgcgcaggatacggcacttcgtaccacgcttgacctcgccgtcctgcaccatgacgccggcgatgttgccgaacttggaggagcggaagatctcgcggatctcggagtgagaggtgacgacctcttcgtattccggcttgagcatgcccttgagggatgcctcgatgtcttcgatcgcacggtagatgaccgagtagtacttgatctccacgccctcgcgctcggcgaggtccgccacctgacggttcgggcgcacgttgaagccgatgataacggccttgtcgaccgtggccaggttgacatcattctgggtgattgcaccgacgccgcggtggatgacctggatgccgacctcgtcggatacctcgatcttcatcaaggaatcctcgagcgcctcgaccgaaccggacgaatcgcccttgatgacaatattgagcatgtcgatctcggactcggcgaacttcttcttgaagtcctcgagggagacgaccttgcgacgcttggccagctgggcggcacgctcggtggcctgacgcttctcggcgatctggcgagcggcacgatcatcggaggcgaccaggaagaggtcaccggcggtcggcacggaggtcaagcccagcacctgaacaggtgtggacggaccggccgcttccatcggctgaccgttctcgtcgagcatggcacgcacgcggccgtacgaagtgccggccacgatggcatcgcccacgtggagcgtaccctgctgaaccagcacggtggccacggcaccacgacccttgtcgagtcgggcttcgacggtggcaccacgggcgtccatgtcggggttggcgcggaggtccagctcagcgtcagccgtgagcagcacggcttcgagcagcttgtcgacgtgcaggttctgcttggcggagatgtcgacgaacatggtgtcgccaccatactcttcagggaccaggccgaactcggtgagctggccgcggaccttctccgggttggcaccgggcacatcgatcttgttgacggccacgacgatcggcaccttggcggcctgagcgtggttgatggcctcaacggtctggggcatcacaccatcgtcggcggcgaccacgaggatcgcgacgtcggtgagctcggcaccacgggcacgcatggcggtgaacgcctcgtggccaggggtatcgaggaaggtgatcttgcgcggttcgccttcaaggttcacggtgacctggtaggcaccgatgcgctgggtaatgccgccggcctcacgtgcgatgacgttggtcttgcggatggtatccagcagtcgtgtcttaccgtggtcgacgtggcccatgacggtgacgaccggcgggcgaggcttgagatcctcgtcatcctgcagttcttcctcgtcaaggttgatgtcgaactgctggagcagttccttgtcttcctcttctgcggagacgagctggatgttccagccgatctcttcgcccagaatctggaaggtctcctcatccaaggactgggtggcggtagccatctgacccaggtggaagagcacggtgaccagcgcggcctggttgacgttgatcttctccgccagatcggccagggaagcgccctgacgcagacggatggtctgaccgttgccgttggggatgcgaacgccgccgatggtcggtgccttcagctcctcatactcatggcgctttgccaggcggttcttacgggccttcgaggacttaccgccctgacgtccgaatgcacctgcggcaccgccgcgaccgccgcgaccgccgccacgtgcgggaccgttgctcggtgcgccgccgccctggaagttattgccgccgccttggcccccacggaagccgccgcgtgcgccgccctgaccggcaccctgggagccgccgccctgacccggacggttgtggccccactggccgggacgaggaccgccctgaccaccttggcccggacgaccgccacggaagccgcggccctgcccctggccttggccgggacggcccggacgaccgccacgaccgctatcagcagtcggacgagccatcggatgcggacgcggaatatcacccggcgtcggggtgtgcataccctgcttgcgggagaacgggttgttgcccgggcgcgggccctgagcgtgcgggcgcggaatcgcgtttgaagcggcattgccgccattggcaccggcgccgccctgagcgtgcgggcgcggagccgaagcattgtcgcggttgttctgatgctgccccggctggccattgttcggacggccctggttgttacgacgatcgttgttacggcgatcgttcgggcgactctgacgaccgttctcgcggccttcgcgattatcgcgaccattctcacggttgtcgtgctgaccgtggcggccgggggtcggcatgccggggcgtgcgccgccctgcggacgcggtgtcggtgcgcccggagtcggagcctgctgatgtgccgaggcgggcgatgcctgacgtgcgggagcggccggagtcggtgcggaagatgaagtggaagccggggccgaaggtgcggccgggcggcgctgctgcacgggcttggcagcaggcttttgtacggaagatgcgggcttggaatcgcccttggcgttgtccttggcgaactctgccttcagacgccgggctaccggcggttcaatcgtagaagaagcggacttgacgaattctcccatgtccttaagcttctcaagcacggttttgctatcgacattcaaaaccttagccagttcgtatacgcgtggtttcgccactaattactcctattctgtgaccacgcgcgtgcatgggcgtggtcagttggtgatgacggcaagcctaccctgtctcatcgtgcgaccatgatcgtgttacctcgtctctggtgtgggcgatttcgcgcacactgcaccagcccacatacgccaatcaagcatactcatagcgctggatagcgtagacgcagcgagccgcgccattgctgacgcggctcgtatcaggaaataatgcgccctgaagatcattcgccttcgagcccggcggcctattcggcttccggagcagcagcctcggccgcagcctgggcggccttttcagcggcgaccttcttggcatgggcctcggcggattcgatgccgatcttccagccggtcagcttggctgccagtcgtgcgttctggccttccttgccgatggccagggatagctggtcgtcgtggatgaaggcgatggcggtcttgttcttctcgctgatcacctgtacgccggtggccacagccggggacagcgcggctgccacgaacttggccggatcgtcggagtagtcgacgatgtcgatcttctccgggccaaggttctccataacggcacgcacgcgagcgccgccggggccgatcagcgcacccttcgggttcacgccatcggtgttggccttgaccgcgatcttggtgcgggcgccggcctcacgagcgatggccatgatggacacggcaccggagaccagttccggcacttcacgctcgaacagcttgcggaccagctccgggtgggagcgggacaccacgatttccgggcccttgatgccacgggccacgttcaccacgtacacgcggatgcgttcgccgtggcggtaacgttcgccgggcacctgctcacggcgaggcagaatggcttcgacatcgcccatcgcgacatgcacgttggaggggtcggaagcatcctgttggatgatgccggtgatgagcttgcccttctgaccggagaacgcgccaaataccttctcatcttcggcgcggcggaacagctgggtgatgacctggcgtgcagtggcggcggcgagacggccgaagtcacgcggggtgtcgtcgtattcctcgcccagcttgggagcggggtgcgggtcgtcctcggtgggctcgaccgggatttcgtcggcggcccagacggtgaagttgccggaacgttcgtcaagctccacacgcgcgtgcctggcggcgtgcggggtcttgaggtaggcgaggcgcagggcctctgccagcgcatcatccagggttccggggtcgattccttgctcggcggcgagcttgtgtattcctgtcaggtccagttccatcgatccgtacctcctatgaagttatgtggcgcatggcctatgagtggtcacagttagctattagtgtaggtttccatgcagacacgcttctcttcaggacggtttacccggcgcttggcatccgcactatgcgcgagcgcgatgctgtgttcgctttcggcgtgttcgatgccgcgactggccggacgggccgaggcggaagctcaaatgagcccttgcgagaaagcgatgacgttggcggactacgccacccatccggctgaaggcacgccgttattagagcagtatgccaccggtctggccgctcccctggcttggattgacgttgccgggtattgttcgggtcgttttgccgagggaacgttacgtgacgcgcagaccaagcaatggctggcttttctggccgataaattcgggcagtccgcgcctgaggtgacgccggcgcgtcttgatggcgtcacgtccgccaacgttgaccgaccggtattggatgcgatggccgtggccgaggatcgcgccggattcgctatcgaggtcttggccgcacgaggacagaccgctggggctacgttggcgttgagcgatatgcataagaccgccgggcagcagctggtgtcgctggcgaacggcaattttgatgattccggcgcacagtccagttcttccggccagagcgacccccgccaaaaggtctatgccatcgaccaactactggccaaccccaccaccatcgccgacaaggcaagcggccagaccgtaccgaccgccgccgccatcgaaatggactgcgcccgcgcgcagatcaaggccgtgaccgaatcgaaatcttccaccgagagcgatacgctgctcatcctcgccgcactggccgccaagcacgcctacaccgcgttccaacttggctacccagcgactgacgccacattgttcgagtagacacacactcctcacgaagccgatgcgaacttgttggatgctagtgggcaagtcgcgttgaggcacgttccaccaatgtgaaatcggtggtgtacgtacgggccgggcctgagtatccttcgatgcggtcgataagcatgtcaacggcatgcttggcataatcgtcgatatgtggatcaatggtggtcagcgccggcgccgagtactcggcttccggcacgttatcgaagccgaccacttgtacatcgtcaggtacacgcaaaccatgtcgttgattgcggcagcgtgaacgacatgcaccaaaggctcgtcaaggcgcggcgcatgatccgcaggcgcatccgggagggccaaccgttcatgttcctcgacgaggggctcgcggcagccggcccagtgccgtccacgaacaacctcgtcgaatcatggaacgcgcgcctgcgcgacatgccgcgccgccaccgcggactgcggctggtcagacggctgaaggcgatctgctggtggtgccaccagcacacggaacggcccgaaagcgacgcgtggctcgcggccaacgcgatgaccgacgaacgactcgagcgcctctaccggcgggcatgggagagaagcccgcagagcatgcacgagacgttcggcattcccatgagacacggcaccggcatcgactggaacgagttccacaccagggtcgaatggcagtcgaacgactagaccgccggacatacattttggcctataaccccgaatacggacgttcgcatcaaaaacaaaaagggttccgggacaaaccccggaaccctaaaggcggataaggcgagattcgaactcgcggaggctttcacctcacacgctttcgaggcgtgctccttagaccgctcggacacttatccatgctgccaaaatggcaacttgttcattatgccacattctgccgacctggcaa

SEQ ID NO: 3075 - DNA, 8981 bp, Unknown
  R19_24m  MAG No. k141_33309
accgcccttgccgcgcggcttgaaacccttgccaccgcggttgcccggtcggcgatcgccataccccttatggccgccgccgtaggacttgccggaacgctcgttaccttctgccattacttgttttccttaattcgttgttgattaacggttttccacggcgccgagcgccttcttgccacgacggatgagcgcgaagcggccggccaggaagtcggcttcggccagcacctgctcctcatcctcgatacggttgttgttgagatacacgccaccggacttgatggcgcggcgtgcctcggaagcggacttgaacagtccggcagcctgggcggcgtcgattacgcgatcgcccggcttggagacggggaagacgtgctcgccgttctcgtcgaccaccttgaagccgtcgagcacggattccagcgtttcctcgtcgatgtcttcgaggttgccaccgcggccgaacagcgcaccggaagcatcgatggcagcctgggtagcggcctcgccatgcacgaagctggtgacctcccaggtgagggtcttctgggcctcgcgcttgccggggttggtcttggattcctcgaccaatcgttcgatttcggccttgggcaggaaggtgaacgccttcagcaggctttccatctccacgtccgggcggttgatccagaactggtagaacttgtacgggctgagcatcgtggcgtcgagccagacggcgttgccctcggacttgccgaacttcttgccggaagcatcagtgatgatcgggctggtgaacacgttgacgtccacaccgcgcaccttgtggatcaggtccaggccggaggtgaggttgccccactggtcggagccgccgagttccagcgtgcagtggtattcgtcaaacaggtggaggaagtcgttgccctgcagcacctggtagctgaactcggtgaaggagatgccttcctcagagttcaggcggcgggcgaccgtgtccttggcgagcatggtgcccagacggaagttcttgccgacgtcacgcaggaagtcgatgacggtcatcgaggcggtccaatcgtaattggacacgaaacgtacggcgttcgcgccttcggtgtccagaatgccgccgatctggttcttcagacgatcggcccagccggccaccacgtccttcgggttgagcgtgcgttcgccggactggcgcgggtcgccgatgagtccggtggcgccgccgaccagggcgattggatgatggcccgcaagctgcaggtgacgcatgttgatgagctgcacgaggttgccgatatgcaacgatgcagcagtggggtcgaagccgcaataataggtgatgggctcgccgttcagtgcttctgcgagtcgatcccggtccgtggactgggaaatcaacccgcgccattccagttcctcaagcagggtgttgaaacccgcttccttgaagtcggtgacgtgagccatagcttgtcgcttctccctatcgaattgtgaatgagactgcccaattgggcacagtcaagtttcgcagaacatggcgacagtgccgaacaccagccgagccgcgcgattcagtaaaacaccttattctagcggcgcgggcccataagttcgcgcaaagagtcgatgatgtcctgacgatccggcacctggaacttcgggaaggacttgagcatacgcttctgctgtgcgttgatgacgccattgacggcccagcgcagacgctcaaccgtatcctgcgaaaactcacgcatcctgtcggataccgcactggagccccgctgccacgtgccaccggcgcgtgccgccacatcctgcaccacctgagagacggaatcgagcacctgctcgaatccgagcatgcccgtaaccgtgaccgccaagtcgatgatggtgatcagagccagtaccgtgaccagcgtatgcagcatcggcagcggaatcatatccgtgacccgctcgacatatggctgcgaaccaagtaccacgcccacgccgccgagaccgaaaatcaacgcgcccagcaggcagacgcggccttggaggttgaagcggaaattcgagtaatcccaccagcgggcgtggaacagctgctccatgacccacgaggttgtgtattcgagtatcgtggcgcccaccatcgaaatcaggaagatgatgatcgggttatgtacgttgccgagaatggcgacgccgagtatcgcgccggtgccgtagatcgggcacagcgggccgttgaggaaccctcggttgaccaagcggtgctgttggcaggagacgagaatggattcgtacatccagccgacgaaactgtagaacagaaaccagaggaaataatgttcgagtgtgatgatcatcgacgggcttcgatctcggcgtagggcttcgcggcgggcaacgcgcgcttgttgaaccggtcgagcgagaaggtctcggcggtggcggagcatttgtccgccaaggtgaccagatagccttcgatatagcgcggcggcaccagggtcatcgggaacatgtggttctcgatgctgttgcgttcgatatcgttgagcttgaagtccttcagggcattgaccagggcggcgtggccatgggtgaagccatgccactggtgttcgccgttatcccagtcgtgccagtcgtacaggaagtaatcgtgcaggagggccgcgcgaatcagggatttgaggtcgacgcggtaccacaggtgcgcgcggtcggccatccacacagccaggcaggcgacacgcacggaatgttcgaacgtggtgacgttgccgtgctggtagcagcagcgttcgatctgcatgtggcgatgctcgatgacctcacggccgtgcttggcgaccaggcgttgaatctgcgttcgggtgagcagatgtcccacggtttcgaccctccgttcgggttggttcagtgcaatcccttgttgtgaattacgattacccgacgatattcaagaatccatcgagtaataccgtgaccgattgtagggcacacgtatgtccgtgcacactcatccaaaagaacgacaacgggaaccgttaatcgtggtgggtttcaagatagtcgagataaccctgaaaaccgccatcgaggcttgctacatcgtaaccgcgatcggcaaggatttcagctacttcctcgctccaccatccttgagcacaatagactacgacagttcgatctgtgggcacggttttgagcacatgggccagcgggtcgagtggtgcattgatggcaccttcgaccgggtgggcggcgaagtcggctggttccctcaagtcgagcagcgtgaccgtattcgggtcgagcttggcaaattccgccggcgtgatgcggcggtacgatgattcactgctctcatcgtcatcgaccgcattacgcaaagcaataggcatgttcttcccctctcgttctgatcttggctcccctcaaggaggggtgccacatagctctaaatcgcgcaggccggctgaatatagttggccggatcaatagcagtaatggtcggctgctcaccgcacaccgggcagtcgggcacatggttcggcaacggcacacggcggatgttcatggtcagggcatccacagtgagcatacgagccacgagcggctcccccacgccggcaatcagcttgacggcttcggtggcttccagactgccgatcacaccgaccaccgcgcccagcacgccggcttccttgcaggtcggaatctcacctgcggcgggcatatcgcggaagatgcagcggtagcaggggccttcgcctgggatgacggtcatcacctggccggagaacccgaccacgcccgcatggatatacggcttgccggccagcacacatgcgtcattgatgaggaattttgcggcgaagttgtcggtggcatcgatcaccagatcgtacggttcgatgaggccggcgatgttgctggcatcgacgagctcgtagtaggtgtcgaccgtcacatctgggttgagcgcgcggatggccgtggccgcggattccactttgggcgctccgacacgtgcagtggtatggatgatctgacgttgcagattgctcatatccaccacatcgccgtctaccagtccgatatggccgacgccggccgccgccagatacagggcggccggagagccaagcccgcccgctccaatgatgagcacgctggaggccaacaaccgcttctgccctttgacgcccagccccttcaaaatcagatggcgcgcgtaccgctccacctgttcatcagtcaatgccatgttttctccatgtttccagctcccctcagtccgctacgcggccagctcccctcagagaggggagctgataaaagtgtcagtgcaaatatcccgtagtcggactggacggcacggcctgtccctcggtcaccttgcccagaccggacagatacgccgcacgaccagcatcgatggcgtgcttgaacgcctcagccatcagcgggatattgccagcagaggcaacggccgtgtacgccatcaccgcatccgcacccatctccatggcgtcgcatgcctgactcgggcgtccgatgccggcatcgatgatgaccggcacatgcgcattggcgatgatgatctcgatgaagtcacgcatgcgcaggcccatgttggagccgatcagcgaaccgagcggcataacggcggcggcaccggcctcctccagctggcgtgcggcaatcgggtccgggaacatgtagggcatgaccacgaagccttccttggccagcatttcggtggctcggatggtttcggcgttgtccggcaggaggtacttggtctcgtgttcgatttcgaccttgacgaagtcggtgtggcacacttcgcgtgccagtcgggcgatacgcacggcttcctcggcgttgcgcgcaccggaggtgttgggcagcaacgtgatgccttcgggaatgtagtcgagcacgctgttctcggtggtctgcgcgcggcgcagtgccatggtgacgatttgcgtgcctgcatgttcgaccgtggccttgatgaggttcaggtcgtagcggccggagcccagaatgaatcgcgactggaactcgtgaccgcccagggtcagcggcttgtcttccactggcagaatcggcgcggcggtgccgaccggattggtgacggcgggctgcggcggcagcggagtcgcctcaacagatgcttcagtaaccggattaatattgctcatagcttttcctttcatccaccctgtacaaactgcacaatttccatgacgcactggtcgtcgagcatggcgtcggcacgcttatcgcgcgggataatctcaccattgagttcgatggccacacgctcggcgcggaatccgtgcgcttcgagataatcggcgacgctgaccggcgtctcgagcgtgacctgctctccgttgacctgcataatatcctttcagatagtaaaaaagggtgcacgaaacgaaccgtaccttaagtggtgcgcccattcatgaacccaatcatgcgaccgttcgaccgctgtgatgtattggctccatcacgaccgtctcacggctgaattatgcaaacggaatgaaagctgtatcggagaacccggcaaatctgcaacaacgattccttacggcggcatgacccgcgtcaagttccccggtcgaagtctggcgacttcctctcagcctcacggctcccgttcgttacgatttctcagtgtatgccgttgcagtgacaacagcaaaatagagctccctctgacgagggagctctattgggactagaacgtgccgggggctttgtaggcggagccatccgacgtggatgcggggaagagcttgagttcttcgacctcggccttggcgtcggcgatctgctcgcgcacgcgaccgtaagcggtgccgcccttgccgttgcgggagtcgaccgaaccgtggctggagagcacttcgcgtactcccggagccttgtcggccggcaggaacgcggcgaaggtctcgatgaagtcattgtcggtcagatcccacagttcctggccgcggccttcggcgagcttgacgcaggcaccagagagctcgtgcgcatggcggaacggcacaccgttcttgacaagccattcggcgatgtcggtggccagcgcgaagccggtcggggcttcctcttccaggcggtcgccgtcgaagtgcatggtcttgaccatgccggtgaaggcgggcagcagcacttcgagcgtatcgacctggtcgaacacggcctccttgtcttcctgcagatcgcgagcgtaggcggtgggcaggcccttcagggtggccagcagaccggtcagatcgccgatgagtcggccggacttgccgcgggcgagctcggcgatatccgggttcttcttctgcggcatgatggaggagccggtggaatagccgtcgtcgagcttgacgaaggcgaactcctgggtgttccagatgatgatctcctcggacaggcgggagatgtccacgccggtcatggcggccacgaacgcgaattcggccacgagatcacgtgcggcggtgccgtcgatggagttgtcggtcacgcgggagaagccgagctcacgcgccacggcctccgggtcgaggccgagcgtgttgccggccagtgcgccggagccgtacggggaggcgttgatgcgcttgtcccagtcgatcagtcgctgcacgtcgcgaatcagcggccaagcgtgggccatgagctggtgcgcgagcagcacgggctgggcgtgctgcatgtgggtgcggcccggcatcacggtgcggccggccttttcgctctgctcgatcagggcgttgacgaggtcaagcaggagtccggcaatcgcacgggagtggcggcgcagccacatacgaatcaggcaggcgatctggtcgttgcgggagcgtccggcacgcagtttgccgccgagttcgtcgccggcaatgtcaatcagtccgcgttcgagggcggtggcctcgtcctcatcgtcttcgatgggggcgaaggagccgtcatccacatgacgctggagcgtgtcgagcgcatcctccatgcgctgcagctcgtcggcggtcaaaagtcccgcacggccgagagcacgggcgtgggcgcgggaaccggcgatatcgtcgtcggccaagcgccagtcgaactgcgtggacttggacagtcgggccagttccggcgacggaccggacgtaaagcgaccaccccacagggccagatgttcgttgttctcagtcatgaaggctccttgaaaagtgaaaatagctgtgtttaagcgtagcaatgtgttcaaacatacagttgcccccgctggcgagggctgtcacatggagtgtgactgaggacagtcctttcaaagaccactcccagtcagctatgccgacagcctcgcagcgggggcgactgagtaagaattactcgacggtgttcttcgggacctcgatgccgttgccgaacttgacgtcgcgggctgcggccacgcgggacggcaggccatagatgtcgatgaagccgttggaggacctctggtcgaaggtatcgccggaatcgtaggtggcgagcttgtagtcgtacagcgaggagtcggaacgacggccggtcaccacggcgcggccaccgtgcaggaccatgcgaatctcaccggacacgtacttctgggtgtcttcgatgaaggcgttgagcgactgggttgccggggagaaccactgcgcatcgtaaaccagctcgccccagcgcttgtcgatgtcgcgcttgatgcggtgctgttcgcgttcgaggcagcagttttcgagttcctggtgagcggtgatcagagccacggcacccggagcctcgtacagctcgcgggacttgatgccgaccaggcggtcctcgatgaggtcgatgcggccgatgccctgggctccggcgcggcggttcatctcttcgatggcctgcagcggggtgacgtcacgtccgtcgatcttgaccggcacaccttccttgaactcgatgacgacttcatcttcgaccggcgggaaggccgggtcgtcggtgtaggagtagcagtccttggtcgggccgttccacggatcctcaaggaagccggtctcaatggcgcggccccatacgttctggtcgatggagtacggggacttctcggtctgggtgatcggcagcttgtgctccttggcgaacgcgatctcgacatcgcgggtcagggacaggtcacgaatcgggctgatggccttcagcgtcgggtcaatggaggcaatggagacctcgaaacgaacctggtcgttacccttgccggtgcaaccgtgggagatggtgtcggcgccgaactggtgggcggcgcgcacgaggtgcttggagatcagcggacgggagatggcggagaccagcgggtagacgccttcgtacatggcgttggccttgagggccttcatgcaatattcgttggcgaactcgtcacgggcgtcgaccacgtaggattcgacggctccgcaggcgagggcgcgctgcttgatggtctcgaggctttcgccgccctggccgacgtcgagggacacggccacgacgtccttgccggtgcgctccttcaggtacgagatggcgacggaggtgtcaagaccgccggagtaggccagaacaatgcgcttgttatctgccattgcttccctttcgttcaaggtctgaaaaaacaaactgatgcaagtatatacagaagactgtatatttatgcacggcgtgttggttatttggaggcgaggcttagtagccagtcggagcgggagacggcggtgtcgtcattggtgcaaatcaccatgacggtgtcgtctccggcgatggtgcccagcacgccttcgatcggctgcctgtcaatcaccgaggccacgtattgtgcggcaccggaaggcgtgtgcaccacaaccagatttccggcggcggccaccgaggtgaccagtccgttcagcacgcgggacatctgtgcctca

SEQ ID NO: 3076 - DNA, 4363 bp, Unknown
  R19_24m  MAG No. k141_33621
accgtgcgcggatcgtaggtttgcgcggacggtttgcggtgtgatgccatgaaactccctttcgaacgcccccatattagcgggagggcgcgaaacagtgcgcagagaacggttctcgataacaactgtgcgctggtttcgatgcgccaatcgcacatgtttgccgataaaacggcgtgattccagtgtttcagtcgatgtgcgtttgtttgattatgtgcgttggagcgcacagttgttattgagaaccgttctctgcgcactgagccaaggggaggggtgctacttgaatgggcaactatgagtgttgagacgccggatatggacgagttgctgcggctggtgcccactgtgggctatggggatgacgccccggccgatcggcgtgggggagcactgcacctgtccgccgtgctgcccgccttgtccgccgcgattgggcatccgactcccaccaaggtccacgccgatcccaaggcctgccagcgcgcgttgggactgcccgacgccgaatcggccatcgtggtgctcgtggacggcctgggcttctggaacctcgccatgcgcctcggacacgcgccctatctgcgttcgctgatgaacgaacgcgccaatcagcgtcccatcgccacctgcgctccaagcaccactgtggcggccatggccgcattcggtaccggaacctgcccgggactgaccgcaatggcgggctatacgcagctcgaacccgccagccataagctcatccaactcatccagttcaaagacgcgctggcacccaaaccagccaatccgcacattcctgtgccacccatggtcgatccgctcgaccagcagcgcgaggagacggtgttcgagaaacttgcggctcaagaggtgcgcgtcacaagctcggggttgcccaagttctccaaatcgccattgaccgaagccgcattgcgaggcaccgactatcaaggcaacgtcaccccacgcgatcgtgtgctggccgcctcacgtgcctcccgtacccccggcctgacctacctgtacatccgtgacgccgacaaagtcggccacaattacgggtgggattccgaacactgggtggccgcattcgaacatatcgacgcccagctcgcgctcctgaaacgcagcgcacccaaaggcacgctgatcgtcatcgtagccgaccacggcatggtgcaaaccgacatgggccagcggattgacatcgccgttgaaccgcagctcacccgaggcgtgtcactggtcgggggagagccgcgctcgctgatgctgtatgccgagccggatgaacgacctgaggatatagcttgccggtggcgcgattacctgcaagaccgagccttggtgcggaccagggatgaggccatcgcggacggattgtttggaccggtctgcgagcgagtccggccgatgctcggcgatgtggtcgtgcaggcagcgggagccgtgaccctcgtcgattcgcgtacgcaaggagacaaagccacccacctgccgagcgtgcatggctcccaaacggcattggaaatggatattccctgcctgatcgatatggcctgattcggaaattcagtctccgaacagaatctcgtcccagcttggtacggccgaacgtcctgatttacgcttggccggtttggctggtgcctcgtgtttggtggcggcggattcggccgcccgctcctgctcggtggctaccagctgtgcattggggccacgccgtacggtctcgtccgaaatattgtcagaaccctgctctggtgccgtggcaggcgattgctgcaatcctgcggcagatgacgaaacaggtccggcggtctgcgaagagaccgggctgggggccgtagcgtcatgagcctggttcgtggccggtgagatggacgtggataggtccaccgggggcatggaacctgtggaagtgacggagggccggatcgcggcaggccgtgcggccggaatcgaaggcgtaggcgccgcccaagcagacacggcgcgctcgatacgcgcggaacgtacggagtcgccgggcagttcaggaatcgtcggcttgagtttggaatccgtggctgattccggattctgttcgccgagcagttttcgagcggcattgttcaggctcatcacggaattgtcgtgcatattccacgtccattcggcatggatctcacggcccgcggaagtgaatatcgccacgatgcgccaaggctcaagtccgcgccgggtggatttccaggtcactgattccatgccgattccagcagaggccagcgtgcgttccaccagttcgctgatggtgcgcaccctgctgtctttgggtgccgccacggcaaggaattgttcgatggcgtactgtttctcggtctccacggccatggagaaacgacgtaccagcgtttcgctcagatgatatttctccgcgacacgggccggatcggcaccggcgcgaatcagcgactgtatctgggaaatcggcaaagtggactgctgatgcggctggggggcctgtcgcatctcgcttctgacctgcttggcctcaagaatcgcccgttcgagcgtgtcgtccacgctcacggccatttccctgccgccaatggagaatacgaggtcccccgtcttgctcacgcgtacgaaacgggctttttcaagccgatcatctggcatattcgcaccactttccgtcgcaaagacattacttcttttaagtatgccccacgtgtcgaactttacgagtatttcaaatcgtgtatcctatgggcgagtacggcgctgaccgtgctatatatatcgacttacgaaccaaagacgacgaaaggaccatgatggctcaggattatgattccccccgcaataaggatgaggacgaggaatcgctgcaggcgctggggaagtcctcgcagaacgcctcgagcgacatcgacgacgatgagaacgccatcgccgaagactacgaactgccgggcgccgatttgagcaacgaggattcctcggtgaccgtcatccccatgcagggtgacgagttcatctgctcgcagtgcttcctggtcaagcatcgtagccagctcgcctacacggacgaggatggccagccggtgtgtgaggagtgcgccgcctgatggcgttcgacgagacctacaacgagcccgaatccaccgaggtcctggtcaagagcctcgaccccgaacatccggcccagctgcactatgcccacgcgggcgatgctggtgccgacctcatcaccaccgtcgatgtgacgctgaagccttttgaacgggtactggtgcccaccggcgtggccatcgccctacctgcgggctacgtggcgttggtgcatccgcgttccgggctggccgccaagcagggcgtcaccgtgctcaacgcgcctggcaccgttgatgccggctaccgtggcgaaatcaaggtgccgctgatcaacctcgatccggaacgcaccgccgtcttccatccgggcgatcgcatcgctcaattggtgattcagcggtatgttgaggcccggttcatcccggctgaaaccctgcccggatccgatcgcgccgaacgtgggttcggttcgacgggagtggcgtcctgaccggattgggccggttgaatgaccaaggtgatgacggcaacgacggttgcggaaccaatgatggcgaacaggtgcatgcataaggctccggttcgcggttacaatgaacttcatgacgagggaggtgactggcatggcagagattgatggcgagcagtacgccgcccgtaagttgggttgtgagatcagtgccgatccgctcaatccgctggatccaatcaagaaagtgtgcaagtcccaccatcccggtgaggatttgtccatcctcgaccgcgcgtaccggcgcgccgtcatccagcattgcacgcaacggcgcaagtcgggcgaaccatacatcatccatccgttggccgtttcccagattctcgcggatctgggcatggggccgattgtggtggcggccggtctgctgcatgatacggtggaggacaccgactacacgttggatcaatgccgtgccgaattcggcgacaccgtggccggtctggtcgatggcgtcaccaagctcagccagcttgaagtgggcgactccgcccaagccgaaaccattcgcaaacttgtggtggccatgagccgcgacgtgcgcaccttggtggtcaagctcgccgaccgtgtacacaacgcccgcacctggcgctatgtgaagaccacgtccgcccagaagaaggcgcgtgaaaccctcgacgtgtacgcgcctttggccaaccgactcggtatgaacgccatcaagacggagctcgaggaactgagcttcaaggtgctcta

SEQ ID NO: 3077 - DNA, 5353 bp, Unknown
  R19_24m  MAG No. k141_34291
cgatccggcgaatggtcccgaatccaaggaggaagcatcatgcgagtagcgttggcgaacgcaaagggcggggtggccaaaaccaccagctgcatctatctggccgccgtgctggcccggcgcggcatcgaggtggcagtctacgacgcggacccgcagtccagcgccagcctatgggcggccgccgccgaacaggcgggagacccgctaccattcgacgtgctgccggccaacatggccaccctcgcccacctgggcggcgccccggccacaaaggaatggtcgatcatcgacgcccctccgcaaggcccgctgctcgacaagacgctggccgtggccgatttcgtcatcctacccacctcggactcgccgatggacctccagcaggcatgggacacgctcgaccgcgcccgacatgccaccagggcggccctgctgccggtgcgcgtcgaggcgaacaccaacgcctgggcccagaccctagccacgttggagcaaaccgacaccgcgcgcttcgacaccttcatcgccaaacgacaaccgatcaagacctcgctcggcatgaaccccaaacaactgtacgaataccgggaactggccgacgaactgacgcgcatcgccaaggaggaactggcatgaaaggcaactaccagccactgccccgacccgtgcccttcgacaaagtcctcgaccaacaggccgaagacaaacaacccaccgggaagaacaacgccggcgaaccgctggtcatgctctccctgcgcctgcccgtccggctgaagaaccgcctcaaaatcgccgccgccgaacacggcacgccatgcaacagatcctgcgccacgccatcgaacacgaactcgaccgactcgccagcaacgactgaataagggacaccgtacatgccgagatgcgaggattgacgaattgatagttgctatggtaaaatccaactaaatttgatggaacacctgacatgccaaggtggttccgaagcaggaaggccttagagcattggtgatttgagcagtggcggattgcatgaggagagattccgcgtgttctgcgcattatcgcgcgtatctgccattgtaccaatcgcaatgcctgattcgatgaagttctcgttagcatagcgactttcggtgccgtcacgaggactgctttctgaatgcagcttggcaataaatggcacagtccgccacttttcgatagtcacagtttgattaatgcgccttatcgaaagaggcttccatgagtcagatattgacactaaccgatatttcctactgctatccgggcgcgccggaaccattgttcgaacatctgtccgcgacattcgcggccggctgggccgcagtgctgggagacaatggcattggcaagaccacactggccaaactcgcctgcggcatgctttcccccgattcggggacagtctcgccgaacccgtgcaagatggcagtcgcctactgtccgcaacgtactgatgaaacgcctacgaatctggatgatttcgcggcggattggacgggcgagaccatcgccatccgcgacgcgctgaacatcggcgacgattgggcataccgatacgagactctctctggaggcgaagccaagcggctgcaaatcgcttgtgcgctggccggcgatcccgacgtgctggtgttggacgagccaaccaatcatgtggacggcaggacgcgccaagccatcacgcaggcgatgcgtcggttcgatggcataggcatcgtgatctcccatgatgtcgaactgatcgacgcgacgtgttcgcgctgcgtgatgctggagcgccgacatacgcgtgggcgtaacatcacggcggcgaacacctatcagggtggatatacccaggccgcgcagcagatgcgcgacaatcaacgtgccgatacggccgccatacagtccactcgaaaggagctgcaacgcatgcagcgcatcaagcgggagcgggcgcagcgtgcgcgcgaactggatatgcggaagaatcagggaatgcgcatcgatatcaaggacatcgacgctcgcaaagccctgaaaaatctgaaaccggctatcggcaccactgtcgcacagacaagcgcgcaattcgacgggcgtatcgccgccgccaccgacagacttgctcacctcagcgaagcggccaaacgctacgacggcaccatctggatgaacgtcatgccgagctcacgcagggaattgacgcgcatccccaacgaccacgccatcgcggaccaacccgatatgctgagcatcggcccgcgcgaccgcatcggcatcagcggtccaaatggcagcggtaaaaccgcattgatacgacgattgatcgaagcgctggagcgtgatgaagcgcagcggcattcggagagaatgccatatctctatattccccaaaattccagcgacgtggataccgccaacgcaatgaaccgcttgcatgctttgacggacgagcaacgcgccattgtgctcagcgcctacgcccaacttaacgccgaccccgacagactgctcgccggcggcaatccctcgccaggcgaactacgcaaacttctgttgtgcctcggcatgattgaacagccacagctcatcatcatggatgagccgaccaaccacctcgacctgcactccaaacaggcacttgctaatacgctatcctcctatgcgggcgcattggtcgcagtcagccatgacgaatggtttctgaatgccgtcacatcgattcgatggcgatgcgcgtcatgacgctatctatgagtttacgttccttcgtaagacttggatatcggcaagacgcattccttttcgtatgaagctgtatcgatggcaatgaccgagcaagaggacaccagtatgacacgaccgattatgccgcgagcacatggcaaaaaacttcacatggaggcgaacatggctcatgttccttcggccatcgcaatcacggcgatgcgaccggaggaatatccgttgctcgtcgagttcctgtatcaggcgattcatgtatcgccgggaaccccggcaccggacaggagcgttgtcgagctgccggaattgcggcgatatatcgagggattcggacggcccgacgatgcctgcatggttgctcgcgccggactaccgaacggtccgcaaatcgtgggtgccgcatgggccagaatcttcccgaacaactccgcaggctacggtaccatcgacacggcaacgccggaagtctccatatccttgcttcccgactggcggaaccgaggcataggacaccgcctgatgacggcgttactggaccgactgcgaaccgatggtcacgccgcagccagcctctcggtccagcgcaccaacgccaacgccctccatctctacgagtcgcttggcttcaccatcattagcgaacacgacggtgaactggtcatgcgcgtggctctcgcggattgaggcagtgttccacacatcatccgcatggagccagtgcgtaagccacccactgtgatatgtgcggctgcaagtcccgcattcatacaagcaaacaatctgacatacagatgcagtctattccttattatgttttcggctttgctcttgataagagccagccccaccatccatcctcgatgaatgtgggcaggctttcgcaatgtgccacatgacgcaacgtgtagtcggcgtgaaccgcaccaccgcgcaggtgttcacgcatgaagctcacgaatgatacgacctcgaaaagctttttgggaggctcgttcccaatcttgtcctcagtgtgcagcctgtcagtctgaagtcagctttcaactggcaaatgttcaaagagacgggctagcgcagtggatagatccgctccttcgaaagcaaaagtcgcagcagcacgtgtctgcttgtccgcgttgaaggcaagcgagacaccgacggctttgaacagcggtaggtcagaacgactgtcaccaatagcgatgcaattcgaagcttcaactcccaagcattcacattgctgcctcatgaatgttactttggtttgttcatcggcatatgccgctgttttaccaataaacacgccatccttgacagcaagttctggaccgcaccatgcttcaaatccaaatctctgcgcaaggctctcggaaacgactgtccaagcgcaggatgcgaggactggcttgattcccctcgacttgcattccgcaacggactgtgcgattccttgcacaagcgggagatcgttcaaccatccgtgaatttcacttacccgatggccagtgtatccacgagcatcaatatcgcataccgtgtcatttccgatctcaccgcgtgcgtatcgatcctctgcatctcgcatcctgtcgccggtacccaaccggtccgcaataaatgcgccagagctaatgccgtatgtgagcgttccgtcgatatcaaaaaatgcaattcccgccattcatccctcttcatttactggttcagcccgaacctccagccggtaactaagccaatagcgtatcaaaaggcacacatatcagaaaagaaaggcagatagtcccattaaaccgtttcatgcgattgcagttgtccgccgctggctacggctggcagggggaagctgggaaaggcgtcccggcggaaggcccgccggtgcgttcttcttccagggacaaggaaggatgcgggcggccgtgaatggtcgcccgcattttccgtatccgtgtgaaacgggagggagcgcatcatggggcgcttccgactgaaaggacggatacgtatgtcaggtgggaagaagagcaggcgcacgatgctgatggctgccctgaccgcaggggcgttggccttgggatatctggcgccagccgcgttcgccgagggcggtggtggcggttccggcgagggcggtggcggttccggcgggcaggttccatcgcagaccgccgacgcgcattggatctacaaggattcctggcccgccactctggaaggcatgaagcaggcgatacgtgattcggtcaccaccctgtcttccgatttggaggatgggtcgaatcagttcgtggatatgaatgccatccttgccgaatggtcgctgtcggctacgcgcgcctcggcaacggcgtgttcagcggttcctatgtcagttcgaacgcgcgtcagcgttgggagtcccaatgggccgccgaagggcgcggcacctaccaggaccaaggccagtcgtacacgaccggcaccacgtggaccgatcggcttggcgtgcgttcggtggatagcctggtgcaggattccatcaacgccaatcccgctgcctcgttccgtgtggtcatgctggccaagaaccagccgcccgtcgattatccgttga

SEQ ID NO: 3078 - DNA, 11147 bp, Unknown
  R19_24m  MAG No. k141_34302
catggacttcaaggtggccggtacttccgagttcatcactgccctgcagctcgacaccaagctcgacggcatccccgccgacatcctggccgccgctttgcagcaggccaaggaagcccgcgccacgattctcgaggtcatcaacgagtgcattgacggcccggccgagatgagcgagttcgctccgcgcatcatcaccacctccgtcccggttgagaagatcggcgaagtcatcgggccgaagggcaagatgatcaaccagattcaggaagataccggcgctgaaatcgccatcgaggatgacggtaccgtcttcatctcctccgagggtggcgaggccgctaagaaggccaagtccatcatcgattccatcgccaacccgcacgtgcccgaggccggcgaaacctacaacggcaaggtcgtcaagaccacgtcgttcggcgctttcgtgaacctcacccccggcaccgacggcctgctgcacatctcccagatccgcaacttggccaacggcgagcgtattgacgccgtcgaagacgtgctcaaggaaggcgacaccgttgaggtgatcgttcagggtgtcgatgatcgcggcaagatctccctggccatccctggtttcgaggatcaggagaacaacgcccgaccgagccgtggcgatcgcgatgaccgccgtggcggccgtggccgtggtgaccgtgacgatcgccgtggcagccgtggccgtcgctccgatcgcgatgaccgtgacttcgacgatcgtgacgaccgtccgcgtcgccgtcgctccgatgacttcgaggatgattacgacgaccgtccgcgtcgccgtcgctccgatgaccgtgacttcgatcgcgatgatcgcgatgatgatcgtccgcgtcgccgtcgttctgccgaccgtgacttcgacgatcgcgatgaccgtgatgctcgcgactcccgtgatgatgatcgtccgcgtcgccgtcgctcttccgatcgcgatgaccgtggcgatcgtgatgaccgccgtggcggtttccgtggcggccgtggccgtggctcggaccgcaacccgcgctatgccaccgacgacaactacgacgactaccgcgccgaccgcgaagagcgcactgagcgcccgcgtcgccgcgtccgtcgcgactttgatccgttcgaggactaaagccctctcacggatcggtcgcggcatagccgcccccctcacctacgggaagcccgcagggcttcccgcttaacggttcggcattcgaggactgatcgttctctagcttctctcgggtgagaagagcttaatcgcaaaccaaaaggcttctataccgtttcattcggtatagaagccttttggtttttcggcttcttcgcgctacatatttcgatgttgaatagggcactcgtgctgctgccatgtacattcagttgtcagttgacaactattctcatgcatcaagaatggcggaaaacagccattaagatgattggagccacgctaaaaagcgttgacaactgacaacagtttgtacacggcaccgcatggcacctatcctgttgctcacgaccggatctattctctcgtctgttgttatgcccaacagcaaaatccgcttgccgtgccgcgccatgtccgagtcatggccagccgttgattgaatggcggatgatcatcgaaggtactcatgggcgttgatcactgtggcaacaacaaaggccgggcccttgtgagagcccggcctttatgccgtatggcggcggattaatccttaaaggctaatccgttgtcaatcagcgttacagaatcgccatgcacacgaagtccagaatgaacagcgcggccacaatccagatgatcgggtgaacctccttggccttgcccttgcaggtcttcacgatgcagtacatgatgaagccgccggcgatgccgtaggagatggagtaggagaaggccatgaacacggctgcgaagaacgccgggatggcttcggcgatgtcgtcccacttgacttccttcagggaagcggccatcatgcagccgacgatcaccagcacgccggcggttgcggcggacggcacggcggagacgaccggggccaggaacgcggacagggcgaagcagatcgccacaaccacggaggtcaggccggtgcggccgcctgcggcgatgccggcggaagactcgacgtaggtggtggtgttcgaggtgccgcagatagcgccaatggaggtggcgatggagtcggcgaacagggccttgtccatcttggaggagaagccgtggccgttctccagagccttctcatcctcggcggagaagatgccggtgcggcggccggtgccgatgaaagtgcccagggtgtcgaacgtatcggacatggagaaggcgaagatggtcacgatgaccagaggcagcttggagacgtcggagaacagcgccgggaagccctcagcggagaagatcgcgccgaaggtctgcggcagctgggagaaggtttcgctgatggactgcgagttggaccaggtggtaacgccgaacgggatgccgatcacggtggtgatggcgatggccagcagcatgccgcccttaaccttcatcacggtgaacacaatggccagtacgaggccgatcaggaagacccacagcaccttgtcgttgaagtcggccagactcggggtcgccgccacggcgcctcccttggccgcggctttcgggtcgccgggggtgaacttgatcagtccgacgttcagcatgcccacataggccacgaacaggccgatgccgccgccgatggcgtgttgcagggactccgggatggccatgatgatcatcttgcggatcttggtgacggtgatgaggatgttgatcaggccgcacaggaacaccatgcacatggtctgctgccagctgaagccgaggccgaagcacacggtgtaggtgaagaacgcgttgaggcccatgccggcggcctgggcgtacggcacattggcgaacaggcccatgactagggtgccgatgatggccgcgatgatggtggccaggaacacgccgccccacggcatacccgtctgcgacaggatctgcgggttgacgacgatgatgtaggccatcgcgaagaacgtggtcaggccggccagaatctcagtcgagacggtcgtgccgttttccttcaaatggaagaacttctccatttactctctacttccttggttttatgcggggctgcgcaccgcgcgcataatgctgcggctggccccggcgagaattgcgactcgccctgatcggcctgcccaacgcgcgtcaggcgctgcgcatccaatcagaaccgtggccgattatagcttgtggaggtaacgtgaacgggtccgggagtagactgactgccagaataattcggaacaactcagggacacgcagggcacacccgtggaaggaaggcgcgcgatgaaaccggccgtcgaagtcagcatcacctcttggaagaagaatgtcgtcaagcccggtcaggagtacggccgcgtactgctgatgcctggcaccggctacaactgcgaccgtccgctgctctactggtcggcccaggctctggtcgaggccggctggcgaatcgaccgcatgaacgtacgcaacgcttccgacgacctgtccacggtgattccggtcctcaatcaggcgattgacggctggatggccgccgcgcgcgagtccggcgcgggtaaagccggtgattccggggatggcgttgccgtcgatgattctgctaccgtgctggccgatggcgcagctggctcgccgaaccgtgattccgacaccccgtccggccctcgcctgttgctgatcggcaagtcgctgacgacgatgacctacccacatgtggcctcacactacggtctgccgttcgtgctgctgaccccggtgctacatcacgccgacttcgatccatccgcccgggtgattccggtgccggctgtcggcgatgatatcgtcgccgaatccgaggctccgagcgtggccgaagcaagggcgatcatccgcgcagaactggccgaccagtcgcacgccgccagctcccgatactccggcccggcaccgctgatctgcgccggcaccgccgacccgttctacgatcgagcccgcgccaacgcgctcaccccgcacgtgcacgaatacccggatgccaaccattcgatcgaggtgcccggccactggcgtcgctcgctcgactatctgaaggaagtcaccgcgtccgtagcccagtacgccgccacgttgtaatgccttgcgacacgcccgaattctgcaatgtcgctgaccatccgtaatctaatcatccgtaaaccacagaccgttggttgaagtgcgcgcgagtgcatttccgaagtttggttcgccgagccagcgcaggttgagagatataagcccgtcaagggccggcgaaggtcgcttcgcgagattatattgctctgcctgtgcgcagggcttttttgttgcccggccgaaagttccgaactccaagtcaacggccgacttaggaaggaacgccatgaagaggcccgaaaaggaagcggtagtcgctcagcttacggaagaattccgtaacgctgacgccgtctacctgaccgagtaccgcgggcttaccgttccgcagatttccgatctgcgtgaaaagctaggccgcgatacttcctacaccgtggcaaagaacacgctggcacgcatcgccgccaaggaagcgggcatcgagggtctcgacgagattctctccggcccgaccgccatcaccttcgtgaagggcgacttcatcgaggctgcgaaggtcatccgtgacttcgccaaggacaacaaggctcttgtcatcaagggtgccgccgctgacggcactgtctacgatgccgagggcgccaagaagctggcagacctcaagtcccgcccgcagctgcttgccgaattcgccggcgacatcaaggcatcgatggccaaggccgcgtacctgttcaacgccctgcctaccaaggctgtgcgtacgatcgacgccctgcgcgaaaagcaggagaaggctgcctgatttacgccctcacggcatgaatcagtcgcttcgataatttaaacaataaggtttattaggcagcggatctaccacttcgtccgccgccaagattgaaaggaagccataatggctaagtacaccaacgatgagctgctggaagccttcggcgagatgaccctggtcgagctctccgagttcgtgaaggccttcgaggagaagttcgacgtcgaggctgccgctccggttgccgctgttgccgctgttgctggcgctgctgctccggctgaggaagagaaggatgagttcgacgtcatcctctccgccgtcggcgacaagaagatccaggtcatcaaggctgtccgcgccatcacctccctcggcctggccgaggccaaggctctcgtcgacggcgctccgaaggccgtcctcgagaaggccaagaaggaagatgccgagaaggccaaggctcagctggaagaggctggtgcctccgtcgagctcaagtgatttgtgcggcataagccgcaatcacagcttttcgaggaaccccgcacctgtgtttcaggctgcggggtttccgcatactgagtagactagttgacgagggcgaggcggagaacgcgatccggcgtggaatcacaaagctggcaatgagcgaaagttgtcaattctgtgcccagtaatccgccaaaagccggtaaaagatgacacaatggcacgtagtgtggtcaaatagtgtgtccaggaaggcggtcacggtgagcgagtggacggtgaagatcaacggtgtcgaccggatcagcgtcaagccgggggagtgcgtggaaatcggccgtaagccgttacgcccccttgccgatgatggcaacacccgccttgacgtcgccgatcagaccaaatcgatgtccaaacggcacgccatgttcacggtaaaaagcaatggtacggcttcggtccgcgatcttggatcgaccaatggatcgtatgtggtgcgggaaaatggtgatttgttgcgcttgccggccaatgtcgagttcctgttgccgacgtctcccatgcgcatgcagttcggtgatgtgcctgcggacttcattcgtatcgacgatccagtggcaaagccactcgaccttaaggtgcctgatttgtttggctatgcggttcacgaagcaccgcaggagccggatgcggcggatatgtctgtcgacgatattcttgatttgcgggccggcgagccgaccgccatcttcagcgcggataatgttcgacgcaaggtcgacgagcttgaacttggctcgctgaatatcacgcagccagtgacgaaaaacgatgagccggccataccccgtgacctgttcgcggatgcgttggcccagcatgccgagcaggagaccgaacgcaaaaaccagcaggccatggactccgtggtactgccgaagcagcagaccgaacctgagtcgacgactgtaacgcccgcatccaagcacagcaggatctccggtattgtcccggtagatgccatcgcccatgccgttgttaagcacgctcccagcacaagcgagccggcagtggcgtcggcggcggttgttgaatccgatgtggtggctggcgcaagcaagtcagccgaaaacgttcagtccgctccgaataccgacgattctcagccggtggacgctgttgcacagcattctgaaggcactcagtccgaagccgcccagtctgaaaacactcagtctgagaccgcccagccgacaaccacccagcctgaaaccgctcaaccggcaaccgacgcacccgaggatcagcagctggcgaccgaaaccgaaaccgcccagcagtcggtctccgaagcgtatgaagcgtctgatatctactccacgggcgtacacactccggtcttcgagcccggctcggtgttcgagcgtgtggccaagggcgagctgaaagcacaggagccggcagtcgaagtcgatggcctgacctctgacgaggcaaaaaccacgcaagatttcaacgttcagttcgaagtcgcccgtcatcccgaattactggcgttcctcgccatgaatccgtacctgtacgacgacatgtattcttggctcgccgcccgtggcgaggccgatattgacgaagccctgtctcacaacaagggctatcaggaataccgcgaagcggttggaaagtgagtcgagagatgacccagagccagactcagaaccagaatctcacggaaggtctgaatcgcatccgtcgctggcgtgaccaataccgcagcatgcagccgccatcgccgctcgaggatgtgaatcaactggccgcgaagctggagatgacccatgcccatccctccggcatcgcccagctgttcgcttccggccatgttcggttggattcgttgttccgtgacacgggtgtgcttaaggccgccgaacgccatatcgggcgcgtactggatgaccaggccgccaagcgcaggatttccggcgtggcggagttgtcgctcgtggtcggtgtggccacgtggaggggcaacgcgctgccggtgctgttgtacccggtgagcgtcacgatcgaggatgatggcttgtcgaccaccattcgattcaccggtcgcgtgaccctgaacgccgcgttcgtcaatgcattgcgtgagcagggggtgttcctggatgaggattccctgtttgacggtgccagctatgacagtggcactcccgaaacttccgcgatgttcgcccgtatttcgtccgaagcatcggagcgtatctccggcttcgccatcgagcgccagattgtgctcggatgcttcatggacccctcgtcgcagatgatcagcgaaagccgacagttcatcgaccagctggagaatggccccaccggcaatgtgctgttggacgcgcttgccggcgacaaatccgcccgcaccgcgctcaaagatgccaatattccgcaatacagtcctttcgacgtagacccgcatgccgagtacgaagtcggcgatgtggacaatacggtgcgatatgccgcgtcacttgctgccaatggccatagcatcgtggtcgacggcaccttcccgaagggcaccgcggagcaggctgtggccatcgcatcgcgctgcctgatgaatggtcgttccgtgctgtacgtgcccggcgtggccgagcagaagcgtctgttcatccagacggcctccgccaatgagatgaaggcgcaggtactggatgtatccgatgaacacgccaacgccgcgcttgataagcagctgattgccgcagtcggattccagcccggagtcgccacccagcgattcgaccagctggccgacgaactcgtgggcgtgcgctcgcgcttgacccgctatctgggcgacctgcacgggggcaacgataagtggaatgtgtccgcatacgagaccattcagaacctggcccgtatctccgtgctcccgacacaccccgccacccacgttcgacttgacgagtcaagtgccctgagcatcgccaacgatattgacacatggatcagcaagatggaacgtgccggcgagctcggcgaatacaccatcggcccggaagacaccgcatggtacaaggcgtccatcaccactgaagaacaagcggtaaccgcttaccagcgcgtggacgatttgctgcgtcgcttcctgcccgccacccgtgagcaggtggcacgcaccgtgcagacctgcggattcccggttcctcccaccactcgcgagtgggagcgtcaggttacggttttgaagaatctgcgacgagtgcttgacgtgttccagccagagattttcgagcgagacatcagctccatgatcgaggccaccaagccgaagagccagcgcaaggccgagggcacgtcgatgggattctgggagcgccgccgccacgtcaaggaagccaaggatctgctgcgcgtcggcgcgcaggtcgaggacttgcacgaagcgttgaaggtagtcgccaagcaaggggagcagtggcatcagttcgtgcctcacggcggttggccggtgctgcccagcaagctcgacgagatcatctccacccaagaggcgctggtcagcaatatgaccgcgctggataccgtgctttccaccacacccgctggtggcaatctggaaaccgccgatttcgagaaggtggaagcacgcctgaaagcactgctggatgatcgcaaggcactggacaccttgccggagcgttgcctgctggagcaggaattcgcttctgccggtctgaacgagttggtcgccgatctcaacgctcgccgggtgggcgtggagcaggtgcgtggcgaagtgcagctggcatggtggaccaccgtgttcgaggacattgtgcgttcttccgccatcatctccaaccaggatggtgctgcgctgcagaccgcatccgaccgcttcgcacaggtcgatgtggagcacgtgcgctccatcggaccgatggtgtcgcaggaatccatgcgccgcctgtgcgacatgctgttctcccgcactcaggaagccaaccagatgcacaccgtgctggcagggcgcgccagtgtgtcgctgagcaggattcgccgtgatcatccggagattctggccgcggccaagccgattctggtggcctcgccgggtacgctcgccgcactcaccgagccgggtgtgctggctgatgtggcgattctcgatgcgtgcgcgcacattcccgctatcgagttgctgtccatcatcggccgcgtgcagcaggtggtggtgatcgcccactgcgcgacggtaaccagcgaaagcgtcaagcagctgatcgacacgttgcctcatatcgaggtggatgctgccccgtctcgccgtgcgccgcgcctgtccgcattccttgaatccgagggatatggtcctgttcgctatgatgtggccaccgagccggctgccggtgaggtgcggttccaccgtgtggaagcgagcggtgtgccggttatgtcttctggtctggtggaatccagtcagtcggagattgatgaagtggtgcgtctgattacgcaacgtgccgccggttttgctgtggttccttccagctatcgacttgtggtcgtgatgttgaccgacgcattccgcacacgcttgggtgccgaattgaagtcgttggcaggcaaatccaaggcgatgggccgattcctgcgccatgtgcggctggtttccttgcgtgacgtggccggaggtcgtgccactgacgtgattctgtcgatgtgctatgcgaaaaccacgcacggacgtctgcttcagcagttcggtccgctcgaaagcacaggcggtcgcggactgttgctggatgccctggcattggcggaccacagcttggatattgtgtcggcctttggttccgaagatttggatgaagaacgactgcaccagtccggtcctcggttcctgaagaccatgttgacgtgggccgaacagcttgacgaccgtccggtgcttccgttgcgtgatgcggcaggcggcaacgtgctgttcgacgatatcgccgacaggttgcgcgcgcgaggactgaacgctgctgttgattatggattcgacaagggcgtgaagattccgctcgtggtgggattgaaggacaagccgtttgccttggccgtgcagaccgatgacgcgaactttatgtccgtgcaatccacgcgcaggcgtcatcgtttgtcggcacaggatctcatttccttgggctggaatgtgatgaccgtctggagtgtcgccgccttcgtgaaccccgataaggaagtcgaccgtatcgtcagccgtatcggcgagatctaccgcgaggttgaataatcatggcggaatactcggctacacggcgcacaccgcgcaagcacaagcgcgtggtgatgaaaggcactgagcagtttgacgctgacggcgtcaaactcgagcccggagacatgcagaccgaccaacaacggcaatccgacgacgacaaacgcatcctcggcgaactgcctccacactgggctgttttcaacgagcgcgagtaggagttgaggcgcactctgtgcgctctgatgttgtgttttccgcaggcgtacggctgcggacaacacaacatcggccgagggccg

SEQ ID NO: 3079 - DNA, 17581 bp, Unknown
  R19_24m  MAG No. k141_34338
ccgagcaggccgccgccaagaacaacaacctgaaaggcgacttggagaacctaagcggctcgttcgaatccctcatgatctctttgggcgagggcggtcagggcccattgcgttccctcgtgcagacgctcgacacgctggcggacgcgtttagccaactgccagcgcccgtacagcagtccatcgtgctgctgaccgcgttgggtggcggcttcaccgccctgcactccgccatggcaccgttgaacgccagcagctcgcagacggcacggaacttcggcctgatgctggacccgttccagcgggccatcaccgccgcaccactactcaaggacggcatcatccagctcggcacatccatgctcggcacgtccaccaacgccggcacgctcgccaacggcctgacgcgaggccagaccgcaatgaacggcatgaaaagcatcggcagcggcctgttcgccgcgctgggcggcccatggggcatcgccttgacggtcgcaggcgcgctgctggtgggcttcgccaaatccgcgcaggacgctaaagccaacatcagcgaattctccgacgcaatcaaccagtccggcagctccgtcgaaaccctcatcaagaaaatcgccagcggcgaggacaaaacatgggacttcggagacaagttcgccaccggcttaggctctcttggagaagcactcgacaaagccggcatcgaatacagcacgttcgcaaaggccgtcaacggatccaaggaagcgcaaaaactgttcaacgaacagatggaaaacgccgaaaacaacatgtccatcatgcagacagacagtatccgagacagttacaacaagctctccgaccaggtcggcaaagccaaggaacaggtcagcaaaaccaatgaggaagtcgccaaggcgggagccagcggagacacggccgccgaaggcaccaacaactacgccgacagcaccgacaatgccaccacaggcaccaaagacctctccgacgccattgacgatctggtgaaaggcttcctcaacctgccgggaacctacctgaccaccgatcaggccatcaccaagctcaatcaggaaatcctcaacctcaacggcagcatccaggaaaacggccgcgtattcgacgagagcggcaacgccctccaaggccacgaaaaacaggcatacgattcacaatccgccttgcaatccctggcatccaccgcacaggacaccgctcaaaaaatcattgaggaaggccaggccaacggcgatgctgcagcagcaacccaacaagccggagacaaactcgaacaggcccgcaaagccttcatcgaaaacgcccacgccgcaggcatgagcgaacaggccgcaggggcgctcgccgaccgttatggcctgacacgtgggcaggcggatacgttacgtcagggcgtcgagaagctgagcaatgccgccgccaagggcatcgacctgaaaatcaatatcaccgatgatgccagcaaggcgctcgatgacgtgaaattgaaggccgagaaaatcgatgacaagaccgtgcgcatcagcggcgacaacaccgacctgatgcagaagatcgcagacgccaccggagccaccatcgacccgaaaaccggcaaactcgatctggacaagacccagttcgattatgcgatggccatcgccgcaggtgccaccatcgacccgaaaaccgggttgctgcagggggacaacagcgacatgctggccaaggtggccgaagcgaacggctggaccatcgactcgaaaaccggctatatctatgcaaacgacgatcaggccatcggagtgctccaaggcctgaacaacatgcagatcgcggacaaatggttcaccatccatggcaaatacgaggattcctcaggcggcacgtattccagcagcggttatcgcccgaagggcgcgatgggcaacataccaaccggcaagaccggtggcctgttcaccggctacggggtttcgatgcgcggctacgccactggcggccgtgtcatcgagggcctgatgcccggcaaggccacctacacgggtgaagacaacatcacattgctgaacgcgcgcgtcaaaagcggcgaattcgtcagcaacgtgaaatcggtcggctattacggtgccgacctgtacgcggccatgaaccgtcgtcagattccacgtgagaggttctacaagccctcgccgatgatgctgagccagccggtgacgaacaaccagaccgtcaaccagacgatagcgcccgtgttccagcagaagatcgtgcgtccggcggatgacatgtatacggcggcgtcgatcatgtaccgcaacgccgctcatctcgtgggaaggctctcaagatgaacgacctgtggaccttgagcccgcgttacggggagctatgggccggcgacgagctcgtctgccggttcaatcccgcggattcgcccgaccggggcctgtacatcaccgccaacggcgtggagggctgggatacgctgccggacgcgaaggtcgccctgaccgaacgcggccagggcgacggcgcgcatgacgtgtccgaaacggatatcctgtattcggcccgcaccgtgaccgtgcactacgaggcggtcggctacagccgtgcggacctactctccctgatgcgccgcatcaacaccgcggcgcaccgctcctgcaggctgcgcatggtcgacggcgacgaggacacatattgtgagggctacgtggcgcagatgggccgcgactcgcggtggaatcccctgttggagaacgatctgacattgcatttcgtgtgtcctcgtcctgagcgtttgtcgtgggatgcgcggcgttttcagttggttccggcgtgggatgcggggttgggcctttcctacggctccgcggcgagggggttggcctatccgctgtcctatggcacggcggccgtggatgcgcggaacgtgtgcacgctcgtcaacaacggttccagccgagcctacccggtgttcacggtacaaggtccgtggccggacggcgtgcaattgaacttcccgggccttgacatgagcctggactattcgcaggcggtcggcagcgtgccgctcgtgctggactcacggagtcgcgcggcgagcataggcggcctggacgtgagccgcaacctgcgccagcgcggcttccccaccgtgccgccgggcggctcggtggccgtgaacctgcaatccgtcggcgacgggtacgtgaccgtcgaatgccgtgacacctacatgtgatcaaggagggattatgactacagctttgggagtggcccccgattcgaccggcaggggaatggacccgccgacccaccgccggatcatcaaggcgcactgggagaacgtcggcatcgtgtgcggattggacgtgacgggtcgctccgacctgcgctacaacgtggccgcgggcgtggccgtctgctcacgcggcaatgcggacgggtacacggaagcgtattggagcggcgggcagaccgtcgccgtctcggccggcgatccgtcgaacccgcgcatcgacgtcatatggctcaaggcgaacgacatctctcagggcgacaaggacaaccaggtggccgtgggcgtcacacagggcacgccaagcgcgaatccggtagccccgtccgtcccgtccggctgcacgaggctgatgagcatgcgcatgccggcagccgcctcgtccacccaatcggcaacgatggtcgacacgcaggactacgcgatcccctacggcgcgaacctcggcatcctcgccaggatcgcggagaacaaggatctgcaggcgtcatccaatcccgcgtacacggcgccgttcctgatcgacacgttcaagatgccgaccgaccgcaatctgctcctgaccatgtacgcgtgcgtctccgcgccgagcaaaaacggcgcgaagggcgtggccgcggtgcggttcgtcgtcgacgggaatctgtacaccacgaggaaaatcgaatacacggattcgtgggtgacgcatgaatgcacgtgctccctccagcttgcgaagggcccgcacaccatcggcgtcgccatgttcaacgaacagggcccgggctatgtgacgcattacggcgtgaaggacaatggcgacacgtatgtgggccgcgtgctcgtcgtcaaggacgagggggtggcgagatgagctggcgcgcctgcctgtgcgacacgatgaccgggctgctcgaccagcagatcgacatccccggcttcacatggtcgatgaccgtcagcgactccagtttttccacgacgagggacaagggcgtgggcgcggacgaggtgtccgggctccagttgccctggtcgcagataccgggatccacgccgaccgcgcgggcggatgcgctgatgtgcggcaaacgcggcctcgtgctcttctggcacggcgtcctggacggcgacgcctcgttgggcacgccgatcatcggtggagtgttcggcgtcaggtcgagcagtcagcaggatgtgagcatcccgctggacagcatcccgaccgtgctgggcgacaggattctcgcgcacgagggcgggttcggcaccaacgcggcgcacacggcccccggcgggtatgcatggcagggactgtccctgcgcgcgatcgcctgcgaggtgattcgtcaatgcaccagcgccaagcccggcggcacgctccccatcgacctgccatggctcggcgagcaaggcggccaccagcgtacggactaccaggactgggacgtacagaaccagtcctgcaagcagatactcacgaagctcacgaacgtggccagcgggcccgacatgcagttcaggccgtatctttcggattcgcagcacgtgcgataccggttcgaggccgggagtgacggcgacgtgtatctcggccagaagaccgtgcactcattggactaccatccattgggcggcaccctggaggatctgaaggtggaccgcatggcaccggcacagcggttctacgcgaccggcgccgggagcgatcaggccacgatctgctgtctggccgaggacctgaccctgtgccggcggtccgacccgtggccgttgcgcgaaggcgtgtacagcgatcccgacgcgaagagctgggacgtcctgaaatcgcacacgcaggccaagctcgccgcgaattccaagcctctcatgcaactatccggcacgatcgacgcgaacgacgtggacgcttccggcatgcccctgcacgcacccggcacattctggcccggcgagatcttcgaggtctccataaccgggtttcccgatctgcccgacgggatctaccgtcagcggctcatgaagatgagcggcgaccagaccggcaaggtcacgctcctgttcgacatctgcgaagacccctgcacctgacgcagggatcccatgttcttttttggaggttatctcatggcattacatggcgagatcaacccgtccgacctcgatctgctgctcggcacgggcctcaacgcgttggaggtcgcgaccggtctgctcacccgcagaagcggcggcgtgtggatcgacaccggcgacggcagtggcatcctcgccggcgggaacgcctcggacggcatcaaccgcgtcgacaaggacggcgtccaactgccgttggtggacacgagcggcatcgacaaggccgccaaggacgcgcagcagaaggcgatcgccgcggctgcgaaggcggacgaggcgatcgccaagggcgagcagatccgccgggacgcgcaggcgggtatcgatgatgtgcgcaagcaggcgcaggattccgccgccaaagctgatggtgtgcgctccgatctggagtcgcagacgacggcgctcaaatccagtatttccgccgttgacgcgaaggcgaatcaagtcaaggccgccgcggacaaaatctcgcagagggtggatgcggacaaggccgcattggacaagagcatcgccgatgtggatgcgaaggctcaggcagcgagcgacaagggcgataagctggccgggcagatcggtgacgtgaccacgaccgtcaacgggcacacgacgaagctggatgcattgtccactcgtatcgagggcgtcgcttcggatggtcaggccacgactaagagtctgacctctttgcggcagaccgtgaccggcctcagctcgacggtatcgcagagcacgaagaccgcgtcggatgcgatgagcaaggcgacgcaggtcgagcagaccgcgaacggtatcagcgcgaatttgagcaagaattacacgtccaccgccgagtccgataaaaagtatgccgccaagacggagcttaagaccacggccgaaggcttgcaggcgaacatcacgaagtcgcagcagaccgcggatggtgccgtgactgcggcttccaaggcgcaggccactgcggacggcatcaacgcgactctgagcaaggattatcagaccgccaaggattcggacgccaagtacagcacgaaggcggagcttaaggccacgagcaatgaattatcctcgtccctatcctcggtgaggcagatggcggatggcgctgtcacggccgcgtcgaagtcgcagcagaccgccgacggtatttccgcgaacctgagcaagaactatgccacgaagtctgataacgatgccacgtatgcgacgcagacgagcctgaaggccacgtcggattcgctggccgcgagcatcaattccaacgcgaaaaccgcccagggtgccgtcgataaggcgacgaatctcgaagcgaacctgaacgggtttaagaccactgtagctgatacatatcagtccaaaggtattggtgacgagattgtcgaaaatggaattccgaatcctgatcgaccaaataaattctgtctcgaaatagtcgatggagtatttcagcgtactttcccgggtaaagagaaccatgtcgattatggcccatccgaaatccttcaccagatcggacctcataggactataaggtatgccattgatgtccgattggtatccggaaaagacacggttgccgaaggtgatagtatcaacgccatcggaacagatgttggttggttcgcgatcaacgttaagttaaaagatcttgttgatggtgaatggcattcctatgaggcatatcaggatctcggtaatgctgtagttactcgtgtatacatgtcttcatatgttggttctgaaggagctaaggttctccagttccgtcatgtgagtgtcaaggacgttacatctgagcataaaacatattccactaaatccgaattgacccagacggcgaactccattaaagccgaagtaaccgaagtctctcagaccgccactggcgcgatgagcaaggtcacgacgctggagcagacggcgaatggcttgagcgcgaaggtcggcgagacggcgaggaccttggatgccaccgtgcagacggtgaatcaggtcaagagcaccgccgacagcaataaggccgcgatctcgcaggtcagtaccaccgccaatgatgcgctgtcccgcacatcgagcttggagcagaatctcagcggattcaaaagcgaagtgggtcagacctatgcgacgaagtcggacatgggcaaacagtcctcggggtcgaatctctggtgcaatcagcttttcgaccctgacaagccgcagatcacgtcgctggtggataatgtcaccgcgccgaacggcagccgggtcaacctgctcgcagcacgcgacaattttaatcctgacaccagtttccccgtcataccggggcgcacgtatgtcatcaccgcttactgcaagcagatcaaaggcggtttgccgctacatgctggtatctggtacacgcatctgaccagcggacccgcatatgaggggtttgtcgaagcggaatcgacgacaccattgggcgatgggtggatggccgccacatggcgtttcgcctgtccggccgggaaatcccgcggctgcgtgtacttccagatcgacaactggccgtgggatagcggttcgacgcagtggtatgtggcgaacgtcacctgcacggacgtgaccggattgcagccagcaggagattacgccacgaattcctcactgatgcagacggcgaaccagatccgcggcgaagtgtcggagagataccagtccaagaacggcatgtcctcctatgccaccaccagcgccctgacgcagaaggccgacgaaatcacaggcaaggtgacggaggtcgccaagaccgcccagggaaacacgaccaccatcagccaggtgtcccagaaggttgacaggatcaacacgaccctgtcgcagcagatcggcggcaaggccgacacgagcagggtcagcagtctggaacagaacctcgatggtttcaaatccactgtcgcgaagacctaccaggagaggggggactatccgagcaaagccgaggtgcagtccaggatcgaccagtcggcctcctcgatcaaatcgacggtcggccagacctacacgaccctcgatgcgaccgaggcgttgaggaagagcgcgacccgtatgttcgtgctgtacggcgcgtcgggcagtccgaaatgggtcaagctcggctatctcaccagcaacggcgactcgtcgagcgtccttctgcacgtctactccggcgacggcttcaacggcgctgcccgccagaacgcggagttcgagatcttcgtcaaggacggctggcagtcgtccgcgtccgcgtcgggcgcgttcggcgtgagcgtgaaccgcatccgcgacgcggatgacgtgaaggtcaaggtcatggcgttcagcgcgaccgcctgcgacatctgggcgtacctgccgtgggcctggtggaacgggcattacacgctgcagggcgactacacggcgtggcaggacggcccaaactgcggcggcgtgaggatactggactcggaacccacgaacggcgtcgcgcaggacctcgcgtacgacacgctcagcacgcgcagctacgtcgaccagaccagcaggtcggtggccttgggcgtggtgcagaattaccgtggcgcggacggttcgggactggccaccaaatcggacatcaccgccaccgcggacggcatcacaagcacggtgtcgtcgacgtacgcgacgaaatccggcgtcacgcaggagatcagttcgaagatcacgcagaacaacgcgagtctggatgtcaggttcgcgacgaaggccgaaaaccagacggtgcgggatgcggccaacacggccagatcggacgcgtccgatgcacggtcgcgcgtgggggccttggaggactgcatcagcatcacatccgacggcgtacaggtgggcaagcgttcgaacggcgtgttcacaggaccgtccgcactggtcggcaccgacggcgccttccacgtgaagaccagcgccgagaacggcgccgacgaggatgtggtcaagctcggccacgacctcctggccatcaaatcgaagctcaagctgagcgatggaagccacctcgaccggctgacagcgggagcatacggagacaaccatttcgcgctccgcatgaacacggcgggggccgtcttcgacaaccacgaatcggtccagatatggcagaccggctggcagaccatcacgacaggcaatggatgcgagggttacgcgtcgtacgggtaccggggaggctgcctgcgcttccgaggcagagtcaagaccacggtcaatggtgacaacagcctcttcgccgaccccgacctgctcgacctggctacgacacccgtaaaccggaacttcctcctgcccgcctaccggaacggcaagctcgaatggacgaacacgtacgtaccggccaacacaaaacaggtgaagatctacggcgtctgggactgggtgtcactcgaccagctgagcatcgcccaatgaatccaaaagaacaaacagaaaggaggccatcatggccaatgacaacgaaacaactgcggagaccggcgttctcgacctgcgcccacccaaaggcagcatcgtataccagctgctccgtctcgggctcacgttcgaccacggcggcgcggacggggaggtatggtgcgactacacgcgcggcgtgacggccgtgctcaaggaccgtcaggcgggagaggcgaccatctctgacatggacaccaagtgctccgccacggtcactgccacgaagctcgccgccatcaccaagatcaagacatggcgttccgacgaggcggtcgagtgatgcctctggagtcctggacgacggcgatcaccgctctcgtcggcagcggtggagtgggcgccatcatcggcgtcgtgtcctcgcgtcgcaaggacacggcgcagatcgccgcgcaggcgtgcgacatcctgaccgattcggtcatcaagccattgcgtgagcaggtggacgaccaggaggagcagatcgagcatctggagagacagcagcgcaagtacttcgcgctcacggcgtacacccgttcgcttttccactggctgcaggagttctgtgagatcaccgaccccgcgttcatggcgcgccatccgaaaccgggcctgccggacgagctgcgcgccgacatcgcgcccgagaccgtcgcggcgcgggatgccggctgatgcggcggcttgccgcccacctcgcatcacatcgccgaatgcgattttcaaccataggccacccattccgggcggccttttcgtttgcccgggaaaccgggcgggaaggagaggatgtgaagatcctcgacaaaagcaagcataaacacggacgcctgcaccggcgcgtgggcatgacgctggccgcgttcgtcgccgcggtctccatggcgttcgccccggcggcgatggccgacatgcagggcatcgacgtgtccaactggcagtgcggcatcgacatcgccaacacgcaggcggacttcgttgtcgtcggcaccacgtggggcacgggacaggtgtacaacaactgtctcgtgtccggcgtcaacacggatgcgaaccgtatgatcgcccaggcgcaggcatccggcaagaaattcggcttgtaccattacgcgatgggcggcaacccggaggccgaggcccaattcttctaccgcaacaccagcaattattggcgtcacggcatcgtggcgctcgactgggagatggacgacaaccccgcatggggcaactgggattgggtacgccgcttcctgagtgagtgcgaacggttgtcgggtggtgtgcgcccattgctgtacaccggcccggtcgccggcgccatcccgcaggacatccgcgaccggtacggtttgtggatcgcccagtacgccaacatgagcccgaccggctatcaggccaacccgtggatgatcggcgcatacggcgaggccatgcgccaatacagcggcaccggtgtcgtcaacacgtggagtcccatcgacctcaatgtgttccgtggcgacgcatggcagtgggacctgtacgccaaccccgccggcggctccacgcccccggccacaccggccgcgcccgcacagccgaacactcccccggccgacaccaacacgggtggcatcagccacgtcatgcagtggggcgagaccatctggggactcgccgtagcctacaacgcatggcccctgtccgcatggcacacgcccagtggtgacatcaaccgctactacgtgggcgatgtcgtcacctacggcgggggctccgcccccgcaccgtccgacggggtctccaagaccatccagtacggtgacacggtatgggagttcgccatctcccacggctacagcgtcaaccgctgcaccgtcccctccggcaacatcaacgtctactaccccggtgacgtggtgacctgccgctaaaccaaccgatgccgccgtcaccccgacggcggcaccacccaccatcatcatccttttttgatcggagcaaacatgaccgacagcaaaaccccggccgacaccggcgaaacactccccggccccgacacgggcgactggcccgaaaccgccgacgtcacccatgacgtgcccgactggctcatccccagccgcgtctacgatgtgctcaaatggctgggcctcatcgtcctgccagcactcgccctgttcgtcaacacggtcggccccgcatggggctggccccacgtggacgccatcgtgaccacgctcaacgcgctcggcatcctcgccggcgcgctcatcggcgtcagcgccatcaaacaacgcctcgaccgcgccgcatgaccacacatagttcggccccgcccggcatcgcaggcgactcgaatagagtcaacctgcggccggacggggccgatttcgcgttgtggcagagggcttcgcgggctcgatttttgcccacattttgcccacattatccgtaaaaacaggttaaaaaccgttaaaactggttaaaacgaaaaaagccgctcagccctactcccgcaaggcaaagcggccattttccaacccgttctcagctcagtgcgtcttttaacttgctgaagaagcctttcttttggccagcctgtggacgggatgcctgggagacgtgcgtggcgcctgaatcatgcgaggcggcgaactgttcgatgaggccgcgctcggtttcgttgagcttggtgggaatcagcacattgacgtgggcgatgaggttgccgcgctcgtccttgttgcggatgttcgtgacgcccagtcccttaagcgtcacagtgtcctcaggctggcagccggccgggatggacacggtcttctcaccatcgaacgtgtcaatggacagatcgtggccgagcacggcccagctcatcggcacctgaatccagcagtgcaggtcgtcgccatcgcgggtgaactgcttatccgccttgatgcgaatgtcgatgtacaggtcgccggcagcgccgccgccctcacccacttcgccctggttggccaaacgtagacgcgcgttgtcgttgatgccggcgggcacggtgacgcccacggtacgtgtggtacgcacacggccgtggcccatgcagctggggcacgggttcttgatgatggtaccgtggccctcgcaacgttcgcagggggcggaggtcatcatctggccgagcatggtgcgcacgaccttctgcatgaatccctggccgtggcagtcggggcaggtgaccggctgtgcgccgccctgggcgccggagccgccgcactcctggcacagggagaacgtgctgatcttgacgtgcgcggtgccgccgaacacggcggtcttcaggtcgatggacgcggaggccagggcgtcgcggccgggctgggtacgcggcaccgggccctgtgagccaccaccgaacgcggaaccgaagaacgtggagaacacgtcgctcatatcgccgaagcccgccccggagaagccgccggcaccggcgttcggatcgttcgggtcgacgcccgaatcatacatacggcgcttgtccggattggacagcacatcgtaggcgttgttcacttccttgaacttgtcctcgaattcagggcccgcgatgtcggggtggtacttacggctgagcttgcggtatgccttcttgatctcgtcgtcactggcgccgcgttccacacccagcgtctcgtaataatctgccacttgattgatcctttgtgttcgtttggtctgcgggtcattgtgccacagacggcggtcagtcttgggtccggccctcggagaggaaggcggtcaaatatctggctacggccctgacggcggccatagtggccgcatagtccatgtgggtcggccctatggagccgacgaaggcgatgggttccgtgtcgttcgtctggctctccgtctcggattcggtttcgggttcgcctacgggatcgttccccgccggttcgcccgccgcaccgctgcgcccatagccactgctgaccacggaggcatgcagtaggccgggggtgtgcatttcggagccgatggccacgcccacgccggatgcattcgtctcctcgcccaggttgctcatgagcttcatcagcacgacctgttcttccagcgcgtcgaagagcggggccagatcggccagggaccgggagtgggccaggtgcgaggtgccggacatgtacagttcgtccgcgcgttcgtccaatgccatcgattcgaaggcgtcggccagcgcgtcggccacgccgcgcaccgactcgtagccggcgctggcggcgatggatcgcacggtctccgcggatttcgatagggacagtccgacacattgttcgttgacggtgttggagagccggttgatctcgtccacggcgggcatggatgcgatggtcaggccgtgctgggccacgcggccggtgtcggtaatcaccaccgcgagcaacgtggtcatggcaacgggcaccatctccacgtgccgcaatgtggccttggccagcgatggcgaggtgactatggccacttgaccggtgatttcggacaacagtcgtgccgaacgctgcagcgcgtccttgagactcaccgatccggacaggaagctgttgatgccgcggcgctgcgcctcgctgagcggcaccacggtagcaagtcggtccacaaagtatcgatagcccttttcggtgggcacacgaccggccgaagtgtgcggctgaatcagatatccttcatcctccagagcggacatgtcgttacggatggtggccgaactgacgccgagatcatggtcgcgcgtcagcgaagtggagcccacgggctcctgagaacggatgtaatcctccaccacggcgcgcagcaccagcatgcgtcttgattgcgtcatgcgcgcctccttatatatgcatacatattcatatcagtcacggttcactcagggcgtaccccgacggtcggttcgccacgccgcgacacgcgggaacccagaaatattgcctctttcttggctccgccacgtgcaggtggcgcacttcaccttagaacattgtattagcactccttaggcttgagtgctaatgcgttcgtttgcagcgtagcaatgttcactgtgaacgctaacagaacacaaactaccaaaacacgccaaaattgcaccgcaacgtcgcaaaccgacgctagcatggtaatcgcaatgtgagggcgtcaagcgcccggcacaagccggatacgcggcccgaccaattggaaggaaagtaatccatgaccgaattcaaggagaccgagctcgacgagcgcgccatcaagatggcgaaggtcctttcggctgacgcggttgagaaggcaggctccggccaccccggctcccccgtctccctggcgcccgtcgcctacacgctgtaccagcacttcatcaagcacgatccgaatgatcccaactgggaaggccgcgatcgcttcatcctttccggtggccatgcctccctcacccagtacgtccagctgtacttctccggctacggcgtgaccctggacgaccttaagaacttccgtggcggcgctgccacccgcaccccgggccacccggagtacggcctgaccccgggcatcgaaatgaccaccggccctctgggccagggcttcgcctccgccatcggctttgcctacggcgagcgtttccagcgcggtctgcttgacccggagaccccgaaggaagattccccgttctaccacaagatttgggccatctgtggtgaaggcgacatcgaggagggcatctccggcgaggccgcttccctggccgccaaccagaagctcggcaacctgaccgtgatcttcgacgccaaccgcatccagatcgaaggcgacaccaacctggtgctggccgaggacgtgctcaagcgcttccaggcctacggctggtacaccgacgagttcagcttcatccagcccgacggctcctacaaggaggacatcgagggtctggccgacgtcatcgccaaggccgaagccgccgccccggaccagccgaagctcatcaaggtccactccctgatcgcctggccgaccccgggcaagaccaacgacccgtcttcccacggctccaagctgggcgccgaggccgtcgccggcctcaagaaactcctcggctacgatccggaggagtccttccacgtcgacgaagaagccctggcccacgcccgcaaggtcgccgatcgcggcctggaggcccacaaggcctgggacgagaagttcgacgcctggcgcaaggccaacccggacaaggccgccctgtacgaccgtctgaaggccggtgaactgccggaaggcttcgacaaggcccttgacgaccttgaggccaccttcgaagtcggcaagggtgtcgccactcgtggcgcctccggctccgtgctcaacgccatcgccgccgtcatgccggaactctggggcggctccgccgacctcggtggctccaacaagaccgacctcaagggcgctgccaccttcgccccggccgagtgcgccaccaagcagtggccgaactgcaacgagttcggtcgccagctgcacttcggcgtgcgcgagttcaccatgggctgcatcaccaacggcatcctgctgggttcccacacccgtccgttcggcggcaccttcttcatgttctccgactacgagcgttccgccgttcgtctggccgccctcatgcagatcccgaacctgtacatctggtcccacgactccgtcgccgtcggcgaggacggcccgacccaccagccggttgagcaccttgcttccttccgcgcgattcctcagcttgaggtcattcgcccggccgacgccttcgagaccgccgaggcttaccgttacttcttcgagaagaagaacaccctgcctggcgccatggttctgacccgtcagggtgtcccggttcttgccgagaccgctgccaaggccaaggacggtgtcaagaagggcgcttacatcctggtcgacaccgagggtactccggacgtcatcctcatggcttccggttccgaggtccagtgggctgtggctgccgccaagaccctggccggcgagggcgtcaaggctcgcgtcgtgtccgtgccgtccatggaatggttcgaggagcaggacgccgagtacaaggaggctgtgcttccggccgctgtcaaggctcgtgtctccgtcgaggccggcgttgccatgccgtggtacaagtacctcggttcctacggcaagcctgtctccatcgagcagttcggcctgcagggtgacggcgctcagaacatgatcgacctcggcatcaccgccgagcacgtggtggaagccgccaaggcctccatcgccgaagtcgaagccgccaagtgagcaactaagcaataattcaataattgttggctcccctccctgaggggagctgtcaggcgaaagcttgactgaggggagcaatgcttgagcccactcccctcagtccgcgttgcggacagctcccctctcccaggagaggggagcctagggcttgaatccaaggagaaaataaatgactgaagcaactcagcgtacgtccgacaacggcgtttccatctggctggacgatctgtcccgctcccgcattgagtccggctccctgcaggacctcatcgccaacaagaacgtggtcggcgttaccaccaacccgtccatcttccagaaggccctgagccaggtcggcccgta

SEQ ID NO: 3080 - DNA, 4795 bp, Unknown
  R19_24m  MAG No. k141_36456
atcttcgaggctggcggatacgacacattcggcgacctcacttcgcatttgacacagtcactgccgattatgctcgccgcggcccgcaacattgatgtcgaagatcgcgacgtgatgattgaagtgctcaaaggcttcgccgcgacagccgccacgtcggtaatctcggccaagtagtcggaggccatcaaactggttttgccagtcagtctcaatagcgcaagagccggcccctgagatactcaggggccggctcttgcttccatttccccagcggggttggcttaatcgcagtatatctcactgctgaccatgcctgttttacttactcctaatcgatgagcttgtagccgtggtcggcgactacggacttgagtttgtcgagataggtttcggcggccttggagagcttggaacgctcgttcgtgatccagccgaccagcatcgtttcgtcggtgtcgagcggtacggtgacaatcttctcattgttgaggtcgccgttgtcgatgccggtgcacaccgtgtagccgttgaggccgatgatgaagttcaggatcgtggcgcggtcggtcacgttgatctgcttgggggagtactccggccagaccgcttcctcgtagaagtagaacgagccttcctcgccctgctcgtactggatgaacggatagggcttcaggtcctccatggtgatgacctttttggcggccagcgggttgttgcgcgagatgaacacgtgcaacggcgcgcggaagagcgggtggaattcgaggtgcttctcgcgcaggagcttgccaatcacgtccttgttgaaatcggacaggtagatgatgccgatttcggactgcatgttggcgacctggttgatgatgtcgcgcgtacgggtctcgcggatggtgaactcgtattcgtcggacttgatggagttgatcatctccacgaacgcctcgacggcgaacatgtagtgctgggtggagacctggcacagctgcttgcgcggcttggcatgcttgtaacgctcttcgagcaggtcggcctgatcgagcacctggcgggcgtaggtcaggaattccgcgccatccacggtcagggcgatgccctgcgaggagcgggtgaagatctcgatgcccagctcgttctccagttccttgaccgacgagctcagggccggctgggagacgtacagggcatgggaggcctcgttcatcgagccgcactcgacgatcttgacgatgtatttcagctgcagcagtgtcataaagtctatttatatcgctagggatggtcgccacacgggtttataacctcatcaatccactatggcgacacaatatgagacgcctcgcatatcgcggacgctgtgtaacgggatatgcgccacattggtaacctgaggcaggaccagtacgatgccatccagaccttctccttctccagcatcgaccgcttctccacgccgagcctgatgaccaggctcggcgccgacgtgatgaacatccagaacgccttcatgatgattctgcgcatggtgccgcgtgccgcgtcgttgaagtgctcaccgaacagtgcgacatgccggtcgccaaacggccggtcaccgtcgtcaaggacgggtccatagacttcaactgccgcgacgcaatatttggcgacttacaggcgtacgccgagttcggcgagcgattcgcgcgcctgcgacgcgttctcgaagaggatgccgtggatgccgacctcgttggcgccgacgatgttcttggcggtgtcgtcgaagaacacgcagcgctcggccgtgagaccgaagcgggtcaggaccagctcgtagatgtcggcgttcggcttgtgcatcttctccacgccggagaccacggtgccctgcagcagctgttcgaggcgcgggtacttctcgaaggccaggtggaaggtctcatgcgaccagttggtcagaccccatacgccgtagccgtgggccttcaaatccgccagcagttcgaccatgcccggcagcgtgcggggcagcgcgtccgcgtagtggccgatgtagaacttgaagatgtcggcgagttcctggccttgttcgcgtaccacatccgggtagatgtccgcgaaatcctcgccggcgtccatgcggtcctcgtagtggaagaagccgcaggggtcgtcgtcggcgcagatgcgttccacgatttcatcggggaatcggccttcaaggcatgcgcgggtgttccagtccagcagcacgccgcagaagtcgaaaatcacgtcggtgatgggggagttggccatgatggttccttgtgtgtttgggtcgttgggtggggtctgcgatttagtgtacggggtttgtgtataggtcggggtatgtggagtttgaggcttatgtttctctccctccgtctcggctttgccgagacacctccctcgtcagagggaggtcaacaaggttatgcgatgacgtcggcgatggcttcggggatggcgtggatcacgtcgccggccacgattgggtggccgagcgtcatgaagcgctggcgatgctcgcggccgatcagttccggctcctgccagccctgctgctcggattcggaggcgatcgccgccgccaggccatgcaggtaggcggccgaggccacggtctcgcccgtggtggccacgtcatcctgctgggcgagtagggcgccggtcagaccggccagtacgtcgcccgcgccggcggtgcccagccaggccggcgcactgcccgacgcatagacatggtcctcatccaccacgatggtcaccgcgcccttcagcaatacggtggcaccggtgagctcgtgggcgcgcttcgcgctggccaacgggttcagccgcacgtcgtcggcggtgtacggctcgtgcgaatcggcatgctccgcggtgctggcggtggtttcgaaccggttgagcagtttcgccatctcgccggcatgtggcgtgatcaccacctggccgggcacacgctccggcagcaggtcgagtgcgccggcatccaccacgattggcggcatgtcgtaggcgtccttgttctcatcctcgctgccgagcgcgtaatgcttgagcaatgcggcgatggtgtcccgctgcatatcgccgtcggagccctcgacgctagcctcgggcacgccggaccccacgacccaggactgcacatgtcccttgccgatcacggcttccggcagtgcggtgagcaccatgttctgcgcgcgctccgggcccagataccggaccatgccggtgttcgcgcgggcggcggcgctggtggtgagcacggcggcaccggggtagcgctgcgagccggtcaccagaccaaccacgccccgggaatatttggaatcctcgaaccgggggagacggaccgcgtcggacgcgaacgaattatccaccacctcgacgtccggatccttgtcgtcgatatcgaatccgaaatcgaacaactcgatacggccgcaggcgaacgtggcgggcggcagcaccgcgcacggcttcatcgcgccgaacgtgaccgtgaccgtggccggaatgtacgggccgggcagagaaccatcgttcacaccgacgccggatggcgtatccacagcaagtaccagcggaaaatcgcctgacgactcacggttcggcagggcgggctcatcgggagactcgccgtcgagaccaagggcggaggcgagcgcggcgggaatgccgcgtagcgagccttgaatgccgatgccggtcatcgcgtcgatgatcagatgcgatttcctggccacggcgatggcggtctgcaatcgctcaccggcctcaccggcggaaaacccggacgcgcaaccgggaatatcggctgccgggtcaagcaccagcaccttgccgccggcgcgcacgagcgcggcgaatccggcctcatgcagcgaccggcccacggcgatggcggtgacgttcgcgccctcctgggccagcgcggcggccgcgaacagaccatcgccaccattgtctccggccccggccagcagcacgatcgacgtgtcctccagcgccagatcctcgtcgtccagcatgccggccgccatgtgggccgcggcctgggcggccatgcgcatcagcggcacgcctttgtccagcaggggtcgctccatggcccggaccgtatcggagtcataggcgctgtgcagcagcagttcgcgatgatcggcgtcttcggtgtattccatggcaacccctttcttgtgtttgttacttgcggcccgtgtttacaggccatacacctcgtgggcgaacttttcgagcacggggatcgaacgcttgactttctcggtgtcgatgcagtaggccatgcggaagtatccgggcacgccgaagctgtcggacggcacgaggatcaggtcgtattccttggccttcatgcagaacgccacggcgtcgtcctccaacgccttggggaagatgtagaacgtgccgccggggcgcaccacgtcgaagccgatgccggtgagcgcatcgtagagcaggttcatgttcgtctcgtagacgttgaggtcggcggtctggtcgatgactttggctacgcccagctggatcgagctcggcgggcagttgtggccggtgccgcgcgagatttggcccatcatcggcacgagcaggtcggcgtcggtggctgcggggttcaccgcgacgtagccgatgcgttcgcccggcaggctcagcgacttcgaccacgagtagcaggtcagcgagttcgcatagaagctggccgggtagggctgggtggctccgtcgaacacgatttcgcggtaaggttcgtcgc

SEQ ID NO: 3081 - DNA, 3281 bp, Unknown
  R19_24m  MAG No. k141_36641
ccatgtgttgcgtttgattccgcggctgaccgtggaggcgtgtctgccgatcaggccggcgatccgccgtatgctcgtcccgttgccgatctctatccggatgatccgccgttcctcttccgacaggtgcgaatacacttgacccaaggcgcgacaccccttcactggttatctggacaatctccaatctaaagggtgtcgcactttcaaatagacaacgggccacattttcatgctttatgcaaaaaatgtgaggcatacgcacatttcccatcaaacgcacaggtgcaagaatggcagcaattcgccattttttgaaatcaccatgtgcgtttgacggcgcgtaagcctcaccttgttctcagcaggaccgaatttctgtgagctccctatagcgcctccctacgcaatatgtccgcaaacgaccacaccacatgggcgatacgcgccaattcggcgtagcggccgatggacagccactgcacacggtaccgttcgaaccacaactccagatcggcggcaagacgggcgcggcgcgaggcatccagcgcacggccggtcacatccttggtgtcacaggcgtcctcgccgccagccagtaccagcagttcctcgcccagtctattgaacaaccgctgcccatccagcatcacccacagcagttccgggttcaatcctcctcgtgccgagccatcgagcaccgcaacaaccgcactgccgcaatcgatcaacgcccggtcgcaatcccggcgtcgttcgagtcgggcatggttccgcaggagcagccggcggcgcgcatcggcgcatcccagcgtacggtcaaacacgagctctcccccgcacgaccgttccacatacgatgccacatccgtattcagcatgccggtgccggaaccgtattccagctccagcacctgcacggcaaggtcccaggggaatgacaccccatcggagtcgatgcggacgaggcaatccatgatgcgaccggactcgtcgccatacaccagaacggagatccgacggttcatctcatgctcatcgatctcaatcggattccacgcgttctgagcgccataacacaggcccggcacgctcagacgcggatcgttgacgtggccgtaatcgccccaatcggtgaccaccatgccttccgcgccatacttgacacccgccaatgccatgtgatacgtgttcagccaggcacccgcataatcggggaagaaccggctccaagcccgcaccgcggggcacacgaactggcgacggccctgcgcggcgatggtctggatgttgctctcgtcgatctgcggctcgtacatccagttgagcatcgtgatgtcgccgggcagcagatccatcgtgcgcgggctttcgagcgcgatgtccgcccacaacatcggctgccgaccatggcgggcgagcgtttcgcacaaatccctgacgaaaccggcatacagttcatcgcggccggcttccggcgcgtcctgcgcggacctgccacgtcccaagtcgaacgtctcatcgccgccgatattgaaggacttcgaacggaacagcggcgcgtattcctcaatcaggcgcgaggcgaaatcatgggccttgggatcggcggcgttcagcgtgtgatgctccatgcgttcgatgaagctgaacgggcggtcggcgtcttcggggaactcacccagcccgcgatgctcacgggtgcgcagattcatgtacatgtgcccgaacgtggccaacgacggcaccaactcgatgccgcgacgcgcgcagtactcgtccagatacgtgatgtcggcggccgtgagcggatcggtgccacgccacgcctcgctgagctcgacgaacgcgaaggcatgctcgacatacagctggaactgattgtatttatataaggccagctggtcgacgaaccaggtgaggaactccatcgtcggcactcgtccgcgtgtcacgtcgagactgtaggcgcgcaccgcgaacgcgggcttgtcttggatatgcaggcagggaatggcacgcgaggtctgcccgatgatctgccgcagcgtctgcagaccgtaccgcagcccgctttcgccgccgccacgcacggcgatggtatctgaggcgaacacatccagcgtgtattcgtcatgcgccaatcgtgaatccaggcccagggatatgacggtgccgttcatcgctgccggcgcacccgcacgcgcatctcgcgcatcttcggcggcattggcgctggcgtcgtcttcgcctgtggctgcacggacacggcgcgtacggacggtgacgccgcagtaacgctcgagctcgctggacagctgctcaatcggcagcgtttcccaagtctcatcggcaccttcggtggcggcatattcgggaattcgtttctcgatcgtcaccagggacccgatcatagccgtgccatgcgtgtattccaatgtcaccggagcgggaatcagggtgagacacagcgttgcggcatcgactgtatattcgaatgtgggcacagctgttcctttcatactgtttttattattgttcgtccgctaatggcaggcgacacgtggtcgcgccgccatcagcggacgaatcgttggtgaggtacggcggcatacgctatttcacggcaccggtcgtcacgcccttcatgatgttacgctggatgagcatgaagaacaccaccaccggcagcgagaagatcaccgaagcggccatctgcccgccgaaatcggtgcccatggtgggtgtcgagaaggacgacagccataccggcagcgtgtacttcgattggtccttcatgaacgtgtaggcgatcatgtagtcgttccaagcgttgatgaacgcgaacaccgaggtcgagacgatgccgggcgcggccagcgggaaggtgattttccacaggatctgccagtcgtttgcaccctccacggccgcggattcgaaaatgtccttcgggatgttcaggaagaacccgcgcatgttccagatcgcgaacggcagcaccatggcgatgtacgccagaatcaggccgctgtatttgttgagcagcccaagctggttgtagatgatgaactgcgggatgatgccgccggaggtcatctggatggccagtacgaacaccatgatcggcttgcggccgcggaagcggtacagggtcagggccgcgcacgcgaagaacgcgacgatgatcgacaggacgatcgagatggcggtcacgaccacgctgttcttgaggttggtcaggaacgaggtctgggtcacggcaacgatgaagttgtcga

SEQ ID NO: 3082 - DNA, 7244 bp, Unknown
  R19_24m  MAG No. k141_36787
aaagaagtagtacaaacacgctcttgagttctcaaaccaccaccacaccagcaagacaggaaaccaaccagaagaaggaacccgccgcgccgagcggcaacaggtgaataacttacacgcaaccacgccacaacgcaaatcgggcatgaaaaggtacgccagaatcgttgcaacgacggcgttctatcggcgtgtcgaaatcagcttgaatcacgccgttatcatcaggatacgccggctttttatgggctcacgtaacgaaatcagatgttcaccggcgtgttgcaacaattcattccacgttcaactcccctcagtccgatcacgcggacagctcacccgcaattacggacgagcaaagctcgcgcccttatggctcgactatcgtctcgccttcgtctaaaaaaaacagtccaccggactgttttttaaacgacccagcatcaaagagggaagccaaaagggggattagaaggtcaggcgcatttggtgccagaccacgtcaccgtgagtggaatcggaaatgccctcgtcctcatatccgaatcgcgcatagaatccgaccaaccgatctttgcaggtgagcaccaggcctttacggccggctgcacgagtgtcttcaatgactttcctcatgagtgtactggcgcaaccgcgatgctgatacttcggcgcagtatccacgccgaaaatcatttgccagtcaccttgagggttgtgctgcgcggcatcctcgtacatgtcatcggtcaagtcgcgccgatcggtcacaaaaccgttgatgaacgccatgacgatctcgccatcaatcaataaccagaaacattccggataggtctcgattcgggcgcgcagggacgagcggtcggcggcctcggcggccgggaagcattcgaattccatggcggccagcgcgtccagatcgtcgatggtggcgtggcggattaactggggatcagaatcagtcatgtttttgtctttctcttaacactccgttgtgagcaactcccccagtcacgcttcgcgtgctggctcccctcaccttgaggggagccggatggatgtcagattacgtggtattcgcgtagcagggtggcaatatcggtgccgtcgagtttcttgagcaccttcttgaccacggccttttcaatgaagttgagcttcatatcggtgaccggtgcaccgtcacgcaatttgacggtggcgttgagcaggttgcgcacgtcatagacactgccccacacttcaggcacgccgcggtccacgccgagcaacgtgtagacagcttccataccggtgcgcatcgagtactcggtggtgaagatcgtgtcacgcggggtctcggcgaactggccaaggaatgcgaagttcacggcaccatcgggcaccacgtccgggcggtcgccggccgcacgcggcatgaagaacgcggtgatgtacggcatcatgaccggcacggtgttggcgtgatgcttggcgagcgcctcgatcttgtcggtcggcacgcccatgtggtaaagccactcctcgcaaatctcttcaccggtgcattcggtcatcggcttcttcacatagttgccgggcttgtccgggaacaggccgtagacccatacgcacagctggtccttgggctggtcgcggaactgctgctggcggttcagggtccaactcatgagccagttggagtcctgcacagtgacgatgccgccggtgacgaccttgccggagaacgggtcgcgcttgcaaatcttctggatgtacggcggaatctcgccgtccagggtggtgatggtggcgctcatccacttggtggcattcggatcggagcagaacttctccggatggccaaagctcgggtcctggtcggcgatacgcttccacatatcccagccgccgccgggcttcaggtctgggttccatgcggcgggcgagttctgggaacccatggtggagttctccacgcaaccgccgttggtgatgaacaccagatcgttctcggtcaggtcgatggaggatttatcaccctcgtgatccacgtcgatgcgcacggcaagcttcttggtgggcgtgctggcagggttgcgcttgaagaaaccggaggtggcctgaatcttttggatggtgtcctggcctacgccggtgtgctcgcgcttggggccggctcccccgccaatcgcgaattccacgttcacaaccttggtgttgtagcggaattcgacgccatgcgattccagatacttgaccatcggcagaatcatcgactcgtactggttgtagcgggtgaaacgcagcgcggaaaagtccggcagtccgccgatgtgatgaatgtagcgtttgatgtacagcttcatttccagcgcggagtgccagttctcgaaggcgaacatggtgcgccagtacagccagaagttggagttcagcacctcatcatcgaagaaatcggtgatcggcttgtcatacaggtcttcgtccggggtgaagaacagcttcatgatttccatcgaagccttgtcggacaggccgaacttgcccttgagccccgcgtccttgccgaggtccttggtggcgcggcacagcgagtagttcgggtcctccttgttgagccagtagtactcgtcgagtacgctgacgccctcggtttcgatggaggggatcgagcggaacagatcccacatgacctcgaaatgattgtccatctcgcggccgccacgcatcacatagccgaggccgggaatatcaagaccgtcacaggcaccgccgggtaccgggtccttctcaaggatgtggatgttctcgccaggcatctgaccatcacgcaccagataacaggctgcagacaatgccgccagtccggtaccgatgatgtatgcatgcttgttgtccacgtcggccggcttcttcgggcgtgcgaaagcctcataattgccgctgctgtagtacatattccgcctccttggggtagagttgacgcttcgtcaactcttcttgaatagacatcatgtcacattattgccgaacacgccataggcaacgttcggcgttctgccgtattcgccaataccttgcgtctacggttttcgaggcctgtgttggctgttggctcataactattgaaggcatacaggcatactgaggatgctgggtgcttcaccgaaccggatgattgataaggtcccgctcaatccatgccatgaccaaatcggcaagtcggtttacctccgcttcggtgagttcacggcctttgggcagatgatgccatttttcgatgcatccgcggcagcatgtggcggtagcatgctgagcggtgaataccggatggccgcgccatggcgtctgcctgccgtcgttcttcggttcggctgtgcctatgcggtctcgcaacatttctcgcgcatgacgatcgatggtcgccttgcctttggtgcgggcataggctcgttctttgtcggtcaaagcgaatttggcgcggaactgcgaatgagacagccgttccagcatcgcggcaatccattgtcgctcgtcatcgttgttaccagtatccgccatctccatgcccatacgttccacaatagtcgcgcacatcgtatggtggcacatgccttagctccctctgatgaaggagtccccagcaaagccaggtgagggagaggccaggggcgaaactcgccaatcaggcggcaggcaagcagctggggccaaacagaatcttgatctcagcaaacaacgaagtatcccgcttgacgcggaaacgatcgccaaacgtgagcacctgagcgttacccttctcatccagcaccgcaagatgtacttcgcagtaaccaggatgattagcgagcacctgaccgagttgcatcatgcgttggcgctccaacgccaccggcggcagcgtgatgaccaacggacgttcatcctcggcttccaaggtcggaatctgcatttccgtggctctcagagaaacggtttcgtcgcgcaactccacttggccacgaatctgtacgatggcgtccacggcgagttcggcggcggccgcttcatagaccttgccgaagaacatgcattggatggagctttccatgtcttcgatggtcacgatggcccaggggttgcccttcttggatacgcgccggtccacattggtgaccaaaccagccaacgtgacctgctgtccttcacccatcgttttggctcgatcaaccagatgcgcgatggacatttcacgcaaggacgcgagaatcgactgcataccggagagcggatggtcagacacatacaggcccaacatttcgcgttcgaagttaagcttggtcttcttgtcccattcctcaagatcgggtacggtcacggaagcgtcgcccatggcctccgctcccccatcctcggcatcggagaacaaatcgaactggccctccgcctgtttgcgcttcagactcaccaccgagtcgatggcggcctcgtgcacggtgaacagcgcgcgacggttcgggtcaatcgagtcgaaggcaccggccttgatcaacgattcgaccaatcgccggttcagcgcggtcaggggcacgcggcggatgaagtccatgaagttcacgaacttgccgcgcgggccttcgcgttcggcgatgatatcggccacggccttgtcacccacgttacggatggcaccaagaccgaatcggacgacgtcgccgactgccgagtactcgtacaccgattcgttgacgtccggcgagagcacctggatgcccatgcggcgggcctcgcccaagtacagtgcggtcttgtctttgttggtggcggcaccttgcaacagggcggccatgaattcgaccgggtagtgcgtcttcagatatgcggtccagtaggagatcagaccgtatgcggcggagtgcgctttgttgaaagcgtagccggagaacggcaccagaatatcccacacggcctgggaggcctcttcggagtatccatgctccttcataccggcgaagaacggcaccttctccttggccagcacttcaggcttcttcttacccatggctcgacgcagcacgtctgccttgcccagcgaatagccggcgaggattcgggcggcggactgcacctgctcctggtagatgatcagaccataggtctcgtcaagcacctgcttcagaggttcctcaagctcagggtggattggcgtgatcttctgcaggccattcttgcgcttggcgtagttggtgtgcgaatccatactcatcgggcccggtcggtacagagcgataagtgcggaaatatcgttgaagttatcgggcttcagggttttcagcagtgaacgcatgccgtcggaatcgagctggaacacgccgagcgtgtctcctcgggacatgagtttgtaggtttcggcgtcatcgagcggaatcttggtgtagtcgatggcgggtttgccgttggcctcgatgttcttcagggtgtcgtggatgatcgtcaagttggacaggccaaggaagtccatcttgaccaaccccaacgtttcgcacgtgtggtattcgaaggtggtggtgatggtgccatcggtgcgttccagcaacggcgaggtgtcggtgatgggcgcgctacccatgatggtggcgcaggcatgtacaccggtctgtcggatcaggccttcgatacccttggcttcttcggtgatgcgcttggcgtccgggtcggaatcgtagagttctcggaattccctggcctcggcgtagcgtttggctgtcgggtcgaagatgtcatgcaggctgatatccttgccgccggtggccgcgggaggcagcgccttggtgactttttcaccgaccgagaactcgtagcccatgatgcgggcggagtccttcaaggcctgcttggttttgatggtgccatagatcacgcactgggcgaccttatcggtgccgtatttttcgccgcagtattcgatgactcgcgcacgaccttcagggtcgaagtcgacatcgatatcaggaaggctcactcgctcagggttcaggaacctctcgaaaatcaggccatgcttgagcggatcgagctcggtaatgcccatggaataggcgaccatggcgcctgcggccgagccacggcccggacccaccataatgccgtggtccttggcccactgaatgtagtcggcgaccacgaggaagtatccgcagaactgcatctggcagatcacaccacattcgtagtcggcctgcttcaatacgtcgagcggcgggttgccgtcgtaacgcttctccagaccttcctcgacttttttaaggaacagggaggtctcatcccagccttcggggcaggggaatttcggcatgaacgcgccgtcttcgtggtcgtcgaacatcacgttgcagcgttcggcgatggcgagggtgttgtcgcaggcgtccggatggtccttgaacagttcgcgcatctcttcggcggttttgatgtagtagccggtgccgtcgaatttgaatcggtccggatcgtcaagacgggaaccggagttgatgcagagcatggcgtcctgtgcctgggcatcttcggcgtgtacgtagtgggaatcgttagtggccagcagtggtgcgttgagtttcttggcgatggtcagcaggtcaccggtcacctgagtttcgatgggcagaccgtgatccatgagttcgatgaagaagctgtctttgccgaagatatcctggaattcgccggcagcgcgcagggcctcatcgaattgaccgaggcgcagacgggtctggataatgcccgaggggcagccggaggatgcgatcacgcctttggaataggtggcgagcacctccttatccatacgcggataacgcatgacgcgaccttcgaggttggccacggacgaggctttgatgaggttgaccagaccttcgtcgttttcggcccacatggtcaagtgggtgataagaccaccaccggagacgtcgtcgcggcgctgggcttcggtgccccaatgcacgcgggacttgtcttgacgtgcggtttccggggtcacataagcttcgatgccgatgatgggcttgacgccattggccacgcagttggtgtacatctcgtaggcgccatgcatgttgccatggtcggtgatgccgaccgcaggcatgccaagttcggccgcacgcttggccaaatcaggaatcttcgacgcaccatcgagcagcgaatagtgcgtgtggttatgcagttgcacaaagttgttcccgtaatcagccatgcgccccaccataccg

SEQ ID NO: 3083 - DNA, 13729 bp, Unknown
  R19_24m  MAG No. k141_38272
ccaccttggcttcgcgggcggtgtcttcgtccacggtgatgcgattgaccacgttgccggcttcgaggttctccaaagcccaagccaggtaagccgggtggatgcggtacatcgtggagcacgggcagaccaccgggtccaggcagaacacggtcttgtccgggtactgcgcggccagacggttcaccaggttgatttcggtgcccacggcaatggcggatccggcgggtgcgttggcgatctccttgacgatgtacgcggtggagccagtaccgtcggcggcgtcgaccacctgcatcgagcactcggggtgcacgatcaccttgacgcccgggtatgccttgcgggcgcgttcgacctgttcgacggtgaaacgctggtgcacggagcagaagcccttccacagaatcatcttggcgcgggcgtagtcggccggatcggcggcgccgccctgtgccttgaacgggtcccacagcggcatctcgttcagcggaatgcccatcgcgcgggcggtattgcggcccagatgctggtccgggaagaacagcacgcgcttgccgcgggcgaacgcccattccagcacggcgtgcgcattggacgaggtgcatacgatgccgccgttgcgtccgcagaacgccttcagcgcggcggatgagttcatgtaggtgaccgggatgatctgctgcaagccatcggagtccggctgggtgccgcagatctcgccgagctggtcccagcattcctggacctggtcgatgttggccatatcggccatcgagcagcctgcggacaggttgggcagggtcacgctctgttcgggcgtggagaggatgtcggcggtttcggccatgaagtgcacgccgcagaacacgatgtggtcggcgtccgggcgttcggtggcgttcttggccagctggaaggagtcgcccacgaaatcggcgtgcttgatgatctcgtcacgctggtagaagtggcccagaatcaacagtttggagccaagacgctgcttggcgtcggtgatgcgctgctgcagctcctcgtcggaggccttgcggtattcgtccggcagcacctgctggcgcggcgcgttggcgggcagacggtcgagcatcgaggcaccgggaccgtagctgggtgtggtggtgtcgaagtgccatgggtcctgggtcagtcctgcatcgcaggtgctttgcgcgcccagcttggcgatgatctcgtcaacggacggcgcagtgaatagtgcggtcatagtggttcctttccctatatacgtctgtgatgccggcccgaagcgggtcggcgggaaaaatcagatgcgcgcggatgggatcagcgcgtcgagagcttcttcacgctcaccttgtctggacagttccacgatgtcgtcgccatcggattcgtggggcgtgccattctcgacaggtcgtttggggatgtagcggtagacggtggccggtcgttggcggccttcgcgcaccttctccccggtgtcttcaagatcgcccgaggcaagcattttgcggcggaagttcgccaagtcgagggtttcgccgccaatcgcctcatagacgccgtgcagttggcgcagggtgaacgtggggccgagcagtcgggtggccacgtcggagtattcgattttggagcgcaggcggagcagcgcgtagtcgatgatctggcgatggtcgaacgccagctcgggcagttcgtcttcggggaaccatcgtacgttgtcaccgtcctcgaagcccgcggcctcggtctggccgacgagcgcccagtacacgacggataccatgggcaatccgccatgggaccgggtcgggcctccaaaggtgtacagctgttcgaggtatcgcgggtgcaggtctgtggtcgattcgagggccgcgtaggcggactgttccaacgaccgatcggagcgcaggtcgccgccgggcaacgcccagcagcccaggaacggctgacggacgcgcttgaccaggggcagccagagacgggaatgggccgagttcgcggcgttgccggaatcggcggcactgtcgccggtatcgcctttcgggccgagtgccagaatcaccactgacacgccgacctgtggcggtgcgctgcggcgctcggacacattgccgaatcccatgccatgcctctttccataccggttgttctccccgcattgagagcatagcactacttatagtcacaatgaccataaatcacatattggatggtctagcgcacgaatattggtcaggtagcgggccccaatcgctacgaaatcacgtccgtatcccccgatttcgactgtgtcatttcggcgacggacgggaggaacggcgctagggagggtagttcgtcgagactcttcaggcccatttggtcgaggaaggattcggaggtgaccaaaagggctgcgcgggattcggggtccacgccgtcttccttgataaggccgcgtaccgtgagcgagcgaatcacgccatcggagttgacaccgcggatcgcggccacttgggctcgggtgacgggctggcgataggccacgatggcaagcgcctccagtgcggcctgactgagtctcgcagtctggccgtcggtgacgaatgatgagacgaccggctcgaacgcggcgcgactggcgaactgccagccacgagcggtgcggcgtagttcgaagccgcgcgggcggatgccacgggattcatcgccctcatagtcatcgtgcagggcttgcaatgccccttcgactgtgttgcggtccaatgccaaaatgcgggccagctcggtggcggtctgcggctggtcggcgaccatcagaatcgcttccagacatgcgggcagcccgccgggaaaatcgtctaccgtgaaatccacgtattcggggcgcgtctcctccactcccctcacctcggcctttgcggatccagccgtcgattccgtatccgccatgtgttcggttgcattcgttgcgtcaatccgttcagtcaccagtcgccgtccttacgcaaaatcgccttcggaaatgttcacgtcgttcatcgtttcgtctacgccggatacccacctcaggtgcagttcggcaaacggaccatcttgctgatactgcagcacaccttgtttgaagaacacgagcacggccatgaaccgagccaccacctcaatacgagaagtgcagtcccgggtcaattcgctgaacgacatcgactggtcgcccttggattccagtgctgcaatcagccggtcgcgcaccaccagcgattgggcccgcagatcgaccagcggcacgtgcagctggtggatcgatacttcggaggcgggcgcgttggcgatgacctgggcggccagttgggcgagttcgagcggggtcagcgtccataccagctcaggcaacatggcggcaatgccctcgtccatggccgccggatgcgggaatcggccggcattggcggcgatacgcgcccggaaatcaccggcggcctgcttgtaggcgcggtattggaggagtcgggcgaacagcaaatcgcgttcgcgcagcgcctcgagactttgctcgtcgtgctggctgccttcgccgccgggcagaatcgccacgcttttggcctcgaccaaaatagaggcgatgtcgagaaaggcgctggcctcatccatgtttttcgtgaagtcgagcccgcgcacgtatgtcaggaattcctcggtgatcgaggagagggaaacttcggtcagctcgagtttgttgttggcgatcatgccgagcaaggcatcgaacggaccggaatagacttcgaggttgacttggaagccggaggtggaggattcctccgtgctgatttcggcttccgcggagttcccctcaatctcgctacgcgagccagcttccctcagagaggggagccgagaaagggaagtctcattcatcgtttatcgaaacaatcgttacgccacgatgccgcgagcaatgagctcacgtgccacctcacggtattcctttgatgtcttgtgctcaggggcataaaccaccacgggcgcggcggcaaccgtggaatcgggcagtttgatggagcgggagatgaacgtgtggaacaccttttcgctgaacgcctcgtaaatgcgctggcagacctcttcgcagtgcagtgtcttggtgtacatggtgatgagcacgccatccacttccaatgcgggattgatgcgggactgcactttttcgatggactgcataagtagggccacgccacgcaaggcgaagaattcggcggccacgggaatgatcacgccatcagctgcggcaagcgcgttcacggtgagcaggccgagcgatggctggcagtcgacgatgatgagatcgtattccgacttgagcttgcgcagcacactgttcaggatctgctcccggcccacttctgtgaccagttggacctcggcggcggacaaatcgatgttcgccggaatcacatcgatgttctcgaatgcggtgtgctgcaccacatcatgtgggtccacggaaatatcgaacagcgcggtgtaaatcgtgttctccacggtattcgcgttgacgcccagtcccacagtggcggcgccctgcggatcgaaatcgacgataagcacgcggcggccatactgggccaacgcaccggcgatattgatggagctggtggtcttacctacgccgcccttctggttgcacatggcaatgacacgcgccggaccgtgctgttgcagcggttcgggtgcggggaaggtttcgtattcacgtccaagcaaatcggtaggcatactgtctaccttatcaacatccgggttcgctgggggtgcaacgacatacgttcccgccataggcagcgttccttgacggaatgcgctgtctttatcgcggatgtctcgccagtcgtccatcgttgccctcgccccctttgccgggaatacctgctcgcctatcctaatgtactcgccgggctcgcctcggaacaccgttttgcagcgggcattccagtgttccgaggtttatggatctcgtctcgtactatgccgatgcgcttactcggtgcgcagtgcggtggccgggtcttgcttggctgccttgcgcgagggaatcaggccgccgatcagcgtgagcaccacgcttaggatcaccagcaccacgccgccggtcaccggcagggcggcattgacgtccgcattgccgatgaagtgatgcaacacggcgttgatcggaatatcgagcagcacggtcaagcccacgcccaacaggccggagcataggccgatgatgccggtctccgcattgaacacctgggacacgttgtgcttcgaggcacccattgcgcgtaggatgccgatttccttggtgcgctccagcaccgaaatgtaggtgatgatgccgatcatgatcgaggaaacaatcaacgagacggacacgaacgcgataagcacgtaggaaatcacgttgacgatggtggtcaccgagctcatcatgagccccacataatccgtgtaggtgatcttgtctttcttcgagacggtgttgttgtagtcggtaatcgcgtcggcgatgtggtccttgtcttcgaagctgtcggcgtagacgttgatcgagctgggcgcgtcacgactcaccacgccgaatgcggcgaggttgtcgtcgtaggtgccggtcgacacgtactggtcgtagatcgcgacaagcacgtcgttcgaagccgtggcgatatacgagtcgaaactgtcggcgagctgctgttcgctcatcgcggccatcgcgtcggcctgatcgccggcacccgccgcgccagcgccagcgccagcaccagcaccagcaccagcaccagcaccagcaccagcggcatccgatgcgcccgtaccggaccgctgcccggcactcatcatcgacttggccatgttcgccttctgcgtcacgcccagcgaaaccacgtaggtgcgcgcgtcggccgccttggtggcgtcgtccgagggcgagaacgtcatgccgttgagcacgttcgtgttcgggttggccttctgatcggtgacgatggcgctggaggccgcacggtcgatcagatcattggtcagagcgcgcgtgtatcccacgccagcggccaacggtgtggccgaagcatccttcttcgccttgacgacgcccaccaccttgagtttggtggccgtttcgaggcgctgttcgattacatccttgtcgttgccgatgaatcggtagtggccgtcatcgcccttgacgtactggtcggatgccggaatcatgtacagcgtctggtcgagcgccttagcatagtcgatcttgtcttgtggagtgctgaccttgtcgccggcgttgagcttggacatcatctcgtggtagtcggaggcgggcagcaggccgagctcgtacagcgtggtcagcggcacgctgttgttgtcgtcgagcaccagcaccacctcgtccttggacttcggccatgaaccgttgaccacttggtagttgtcggtgatgaccttgcctacgagcttgctgtcgtccgctccaggcatgatctcattgaacgagtcgggcgcggcgttctcatcggttttgccggtcagcatcgacatctgctgcgaggtgatcgacgaggtgccggacatgccggacgagcttgtggacgccatctgcgaggccattgaagtggagtcgctggcaccgatcgtcacgccgtccgcattgaccagcgtgccatcggggtcgtggtcgaacacggagaatttcacgtcatacgtgtactggataccggcggaacccacatactggtgaatctcgctcttggaattatccaggtatttcttgaagcgggtcaggttgttttcggtaatcgaactggtcaggctggatgcctgcttgacgctgcggtcgtccgggtagatgccgtcggttctgtgcgtcttgccgccgtatccgtcatcgccgcccatctggccgcccatcatgctgctcaggtcgaaggtctgggagtcgatggtgatcgggtaggcggtcatcgtgtcacgctggatgtcgctgatgtatgcgttcacgccagtcgacaccgatagaatcagcgcaatgccgatgatgccgattgagccggcgaacgaggtcagcagggtacgcgccttcttggttttcagattgttgaagctcaacgccagcgacgtgacgaacgacatcgacgcgcggcccatcgtcttgtgcacggccggctgttcggccgtctcatccacgacaaacgggtcggagtcggagcggatcacgccgtcgcgcaggttgacgatgcgcgtggcatattgttccgcaagttcggggttgtgggtgaccatgaccacgaggcggtccttggccacgtccttgagcaggttcatgatctgcacggacgtgtccgaatcgagcgcgccggtcggctcgtcggccaggacgatgtccgggtcgttgaccagtgcgcgggcgatcgccacgcgctgcatctggccgccggacagctggttcggctttttattgatgtgttcgccgagtccgaccttctccagcgccttgcgcgcacgttcgcgacggtcggccttgccgatgccggaaatcgtcagcgcgagttcgacgttcgacagaatcgtctgatgaggaatcagattgtagctctggaacacgaagccgatggtgtggttgcggtacgaatcccaatcgcgatccttgtattggcgcgtcgagatgccgttgatcaccaaatcgccgtcgtcataccggtcgaggccgccgatgatgttgagcaaggtggtcttgccggaacccgagggacccagaatcgcgacgaattcgctgtcgcgtaggttcaggctgactttgtcaagcgcctgttgaacgaaatcaccggttttatagcgcttcgagatcgatttgatctgcagcatgaatacctcttcctggctgacggttcgctgttatgtactgtattgtcacgccttgaatttccggccgactttggtgctccccccccccgccgcgattccgctatgggcggacgagtcgcaaaatggtgtgtctcaccgcgctctggggtgtgaggtcagatacgtttcgatcagggtttcggggcttacgtgcgtgtagatctgcgtggtggtcacgctggcgtgcccaagcagttcctgcacggtgcgcacgtccgcgccgccttggatcaggtgcgtggcgaaggaatggcgcaaggtgtgcggatggagtggtttggtgatgccggcccgctccccggttgctttgacgatttcccataccgattgccgcgagatgcgcttgccgcgtttgttgagaaacagtgcgcgtctctcgggaatcttggcgctggagcgccgttccagctcgccacgccccgcattgaggtatgcggtgatggcccggcatgcgtagctgcccaatggcacaagccgctgcttggagcccttgcccatgagtcgcgcgatgtgctcgtccaggtcgatgtcgtccagattcacaccggtggcttccgagacgcggcagccggtggcgtacatgaattcgagcagggccttgtcccgcaataccaccggatcggttgagccgccggctgccgccgcgtcgagcagacgggttacctcgtccacggtgagtacgtcaggcagggtgctggcacctttgggtgccttgactgcggcagaaacgtcggcagtcaccgcgtgctggccgagcgcgaagcgatggaattcatggatcgaggccagtcttcgggctttggagcgggcggactcccccgcctggtcaagggcggcgatgtagtcttcgacgtcttgtttggttatggcgtccggttcgtggatgccgcgggtttcgagccaatcaatgtatttggcgatgtcggattcgtaggcggtgacggtggccgtggcgagtcctcgctccacgccgatgtggacgaggaactgctcggtgagtctggtgaatccgttggtcatgagtttgtcctctcccccacccgctgcgcgggagccccctcgtcagagggggctaataataggaaaccccgctcggaagcggggtttctagtgtgaagtcacgacttcaagcaatcaggcctcaaccggagcgttgacgtcctcaggcagggcggccttggcggcgtccacgatggtcttgaaggtgtccgggtcggagacggcgatctcagccagagcgcgacgatccagctcgatgccggcgagacgcaggccctggatgaagcggttgtaggtgatgccctcagcgcggacggcagcgttgatgcgctggatccacagcttacggaaatcgcccttgcgagccttgcggtcgcggaagttgtagttaaaggagtgcagcagctgttccttggccttgcggtacaggcgggagcggccacggtagccggaagccctctcgagaacaacgcgacgcttcttgtgggcgttcactgcgcgcttgacacgtgccataatctattcctcagctttctaaagtcttattatttccgggtaagccctatgctcacttctgcagaagctggtgcagcttcttggcctggccgccgcgcagcacatcgtcggcggacagttcacgacgcttgcgagcggacttgtgctcgaggttgtgacgcatggcggaaccgacatgcttcaccttgccggtgccggtgatcttggcgcgcttggaagcggcggaattagttttcatcttcggcattgctgccctccttgctggtttgcttcttgtcggaagtcttctgagaaatcgcggactgcgcgtcggccgcggcctgagcctgagactcctgcttggccgcgagacgagccgcctggcgagcctgacgctcggcgcgggactcggcgccacgacgacgctgctcggactgggtgtggaccttcttgcccttcggcgcaagggtcatgatgatgttgcggccctcctgcttcggcttggactcgacggtgccgtattcctcgacatcgtcggccagacgctgcagcagttccacgccaccaatcgggcgggagatctcacgaccgcgcaacatgatggtgaccttgaccttgtcgcctccgttaaggaagcgggtcacatggcccttcttcacgtcgaaatcgtggtcgtcgatcttcaggcggaaacgaatctccttgatttccgcggtgctctggttgcggcgagcttcacgagccttgatcttctcgttgtacttgaacttgccgtaatcaatgagcttggcgaccggaggcttcgcgttcggggccacctcgacgagatcgaggtttgcctccttggccaggttcagcgcgacggaagtcgcgatgacgcccacctgctcgcccttcgggccgatcaggcgtacctgcgggacgcgaatctcgtcgttaatacgtggttcgtcgctgatgatgactccaatcctctacttcaattccgtggcgaggccctttgctggagtcctgttcaatgctttgggttcatggcaagccaaaaccagcgccaatatgcgctcagcttctgcagacgcatatcagttctttgcgtcattcctgattgcgcgttgtatatcgcaatcgctaggctgtttgccttgaacccgaggccttgaaaggcttccaggtggggttgccccgctttcttgatttctcaagccaaataggaatcttaccacatgcccggacattcgcggaccgtgtgtcgatgggtggataccggctacagtaggcataatgactcaggtatgcgtgatttttggtgcgggcgaatactatgcgggcacgcccgtggttcccaccggtgcgtatgtgattgcggccgatggcggactcgaccatacgcgcgagttgggcatcgtgcccgatgtggtggtgggcgacttcgattcgctggagggccggccgccccgcaccgatgtgcgcaccatcgcgctgcccgcgttgaaggacgacccggacatgctttccgcgctgaaggtcggctggtcggcgggttgccgcgagtttcacgtgtacggcgggcttggcggccgtattgaccatacgatttccggcattcaactgatggcgctgctggcccgacacggggcaagcgggtacctgtatggtgacgggctcatcgtcacggccatcaccgatggtaggctttcgttccccgcgcatccggtgcccgaggacggccgcatggtgtcggcgttctcccactccgatgtttcgcttggcgtgaacgaaccggggctgaaatatgagcttaaagacggcacgctgaccaatacggtggtgcagggggtcagcaacgagttccgcgacggcgtggacgcggccatcagcgtgaaacgcggcacactgatcgtcaccttccccatcgaagtggcgttgccacaggtgagcagattccatgaattcggcggcgatatcggcgagctggacaccgaagtgtccaagctgctggttcgctgacttgcatgccgcgcgcttgctcgtgatgattcgagacattcctccaaaggagaggaaaatcacatgtcggttgcgggcaatccaaattgtgagcgctcacaaaaaatacggcatttttacccaaaacgcacgctgaaacgttgccatgtgtacagagtcggcattacagtagcaactgttggtaaacaatggcccggtgtgccaaagcgcgccaaggccaccctacaagggagaattacatgacagttaagattggtatcaacggcttcggtcgcattggtcgtctcgccttccgtcgcatcttcgagctgcaggctcgcggcggccaggctggtgacattgaagttgccgccatcaacgatctgaccaccccggctaccctggcttacctgctgaagtacgacagcacccacggcaccttccgtcatgacgatggcactccggttgacgtcaaggccaccgaagactccatcatcgtcgacggcaaggaatacaaggtctacgccgagaaggacgccaacaacattccgtgggtcaagaacgacggtgtcgagtacgtgctcgagtgcaccggcttctacacctccgccgagaagtcccaggctcacatcaacgctggcgccaagaaggtcctgatctccgccccggccaaggatgacaccaccccgaccgttgtgttcggcgtgaaccacgacatcctcaaggcttccgacgtgatcgtctccgccggttcctgcaccaccaactccatggccgccatggtcaagctgctggacgagaagttcggcatcaaggccggcttcatgaccaccatccacgcctacaccggcacccagatgctgctcgatggcccgcgtggcaccaagaccggccgcaacctgcgcgccgccgccatcaacaccatcgcccactccaccggcgctgccaaggccatcggcaaggtcgttccgtccgtgaacggcaagctgcagggccatgcccagcgcgtccaggttccggacggctccgtcaccgagctgaccaccgttctgaacaccgagaccaccgccgacgagatcaacgaagccttcaaggctgccttctccgacaccgattactacggctacaacgatgagggcatcgtctcctccgacatcctcggcgacacccacggtggcgtgttcgacccgacccagaccgacgtcaacaccattgacggcgtgaccctggctcgcaccgtgtccttctacgacaacgagtacggcttcacctccaacatgatccgtaccctgctgtacttcgctgagatctccgagtgaaccactgcggtctaggccgctacggttcgtttgagaactaagctgtgagacccccgccttgtgcgggggtttttcgtagtagaacggtaatcatggcaaagaaaaacaagcatgataagggcgcgggttccactccggcgacagtccaactggagaaggcgggcgtggaattccacgtatacgaatacgagcactccaacgaccatatggatgacggctacggcgtggaggcggccaccaagctcggcttcgacgagcatcaggtgttcaagacgttgatggcggacaccggttcggagcgtgtggtgggcgtggtaccggtcagcggacatatggatttgaaggccctggctgcggctgtaggtgccaagaaggcctctatggccgatcccaaggtggcaatgcgtgaatccggctatgtggtaggtggcatctcgccgttgggccagaagacacgtcataagactgtgttggatgaaagcgccctgcaattcgaccagattctggtctccggcggcaaacgcggactgtccgtaggcgtgaacccgcaggacctgctcaaggtcttgaacgccgttgccgcaccaatcggcacgtggtgaccgttcttggcttccctcggtgaggggagccaaggatgactacttcttcctgcgcaactccgacggcagcacgaagtgcatgttttccttgatggtttcgacggacttcataccggtgaagcccaagttttgcagagcgtcaatcacaccggacaccagttcgtccggcacggaggcacctgaggagatacctacggattccagaccctcgaaccatgccgggtcaagctcgctggcatcatccacgcgatacgctttgccgcgctctcccaagccctcctgcgccacctccatcagtcgcacggaattcgaggagttggccgatccgacaatcaccacgcaatcggactgctgggccaccagtttgaccgcagcctgacgattcga

SEQ ID NO: 3084 - DNA, 4688 bp, Unknown
  R19_24m  MAG No. k141_38864
acgtattgcacgtgagccagaggcgattcggttgcgggtcatcgctcacgcgctgagccaagccggtgtgaacgccagtgccgcccagattgccgccatcgaccggctggtcgtcgattggcatggccaaggcggcgtctcacttcccagaggttattcagccaatcgcaagaaacacgtcattcgcgtgtgccaagatggtgcgcatgcgaatcgctgacgttgaggaagatattgaccacgagctggtcagcaaagaacagatcgatgccaagatccacgagatggccgctctcgcgagcgaggattaccgcgataagaatccactgctcgttgcggtgctgaaaggggccgtgaatacgctggtcgcgttcacccaggccatgagcattcctgtacagatcgacttcatgagcctttcgagctatggctcgggcacagtgtcgagcggtgaggtcacagtcaggcaggatttgtccgccgatgttcgcggacggcacattttgattgtggaggatattgttgattcaggacgcacgctcgcgtggctggtcgcagaactgaaacgtcgtggtgccgcttccgtggaggtcttcgctttgctgagcaagccttcccgccgagaagtggacgttgatgtgaagtacgccggctatgagattccggacgagttcgtcgtcggcttcggcctcgactttgacgagcgctaccgcaacctcgattcgatcgcggtcctcaagccgtccgtctaccaaggagtgcaagcatgagcttcccgcaagggccgggtaacggcaataatccgaacccgaacaacaaccgtaacaacggcaacccgttcactaacccgttcaaccgtggcaataacgggaacaatggcaaaggcaacaacaacgagaaccgcccgatatggcagtccccttggctatggggtgccgtgctcgtggtcatggtcgtgctgatgttccagatgttcgccggcggtggcaccaaaaccatcgacaccaaagatggtttcgcgctgatcaatcagggcaaggccacgtacgccgagatcacggacaacaagcaggtcgtccgccttaagctgaagaacgactacaccaagaagaacgccgacaccggcaaggtgaccaactacggcaagaacgtgcagttctactacaccttcgcgcagggcgcacaggtggccaaggccgtggagaacggtgatctcgaaaagggctggacctcgaatatcgagcagaccagcatgctgagctacctcgtcacctcgatcctgccgttcatcatcttcttcgccctgttctggttcctgatgagccgcatgggtggtgccggcggcatgctcggcatgggtggcaagaagaacagcggcaagctactcgatggccagacccccaccaccaagttcgccgatgtggccggtgaagacgaggccgtggccgaagtcgaggagatcaaggacttcctcaaggatccgtccaagtacaaggcgctgggtgcgcgcatcccgcgcggtgtgctgctgtacggccctcccggcaccggtaagacgttgctggcccgagccatcgcaggcgaggccggcgtgccgttctactcgatggccggctccgacttcgtcgaaatgttcgtgggtctcggtgcctcccgtgtgcgtgacctgttcgatgaggccaagaagaacgcccccgccatcatcttcatcgatgaaatcgatgctgtgggccgcaagcgtggctctggcatgggcggtggccacgacgagcgcgagcagacgctgaaccagctgctcgtcgagatggatggtttcgacaacgacaccaacctcatcatcatcgccgccaccaaccgccctgacgtgcttgaccccgctctgctgcgtccgggtcgattcgaccgtcaggtgggcgtggccgcccctgatctggaaggccgtgaggcaattctgagggtgcatgccaagggcaagccgttcgtaccggacgtcgacctgcacatggtcgccgtgcgcacgccgggcttcaccggtgccgatctggccaacgtgctcaacgaagccgcgttgctgtgcgcccgtgccggtgcccagttgatcgacaaccgcgccatcgacgaggccatcgaccgcgttcaggccggaccgaagcgcaagtccaagggcatggctctggaagagctgcgcaacaccgcataccacgagggtggccatgcgctggtagccgccgccctgaacaacaccgacccggtgaccaaggtgacgattctgccgcgaggccgcgccctcggctacaccgccgtcatgccgacctccgaccgctactcgcagtcgcgcaaccagctgctcgaccagatggcctacgcgatgggcggtcgcaccgccgaggaaatcgtcttccacgacccgaccaccggtgcctcgaacgatatcgagaaggctacgaacatcgcccgtacgatggtgatcgaatacggcttctccgacaagctcggtgccatcaagtggggttccgacgatgaccagaccaccgtgatggacggtctgcagccgcgcaagtactccgatcgcaccgccgaagtgattgatgacgaggtgctcaagctggtggagaccgcgcacaccgaggcgtggaccatcatcaacgacaaccgcgagatccttgacgagctggtccgccagctgttggtcaaggagaccctgaacgagaaggaacttgcggcgatcttcgcgccgatcaagaaggctccggttcgtccggtgtggttgtccaacgaccgtcgccccgactcggacaagccgccggtggagattcccgaaagccttaagcgctcggtcggcatgaagccggaagagtagacacgatgacgattcggcccgacctgttcatgtggtttctcacgtacgcaggccgggccgacgtcgttgtggacaatgacaagggagagatgagatgaacgaatatatagagtcttgccagcgggagaaacgcacatacgacgaggaaggcgtgcgcgaggccgtacgtctgttcctgaagtcgattggcgaggatcccgagcgcgaggggctggtggaaacacctgaccgtatcgcccgcgcgtgccgcgagctgttcgccggtctgcaggcctcgccggccgatgtgctggagaagcacttcgacgtggataccgacgaactggtgctggtcaaggacatcgaactgtattcggtgtgcgagcatcacctgctgccgttccacggcgtggcccatgtgggctatattcccgccaaggacggggtgatggggctgagcaagctcgcccgactggtcgaggtgtatgctcgccggccgcaggtgcaggagcgactgacccagcagatcgccgacgcgctggtcgagtatgcgggcgcacgtggtgtgattgtggtgaccgaatgcgagcacctgtgcatgtctatgcgcggcatcaagaagtcttccgcccgcacggtgacctctgcggtgcgcggcatgctgcgcaatccggccacccgagccgaagccatgagcctcattttggataaatagtgtctactaagctccctcatcatagggagctcacttgggacctacatagaaggggaaacataatgactgatttgcaggcgttgcatgacactacgcacaccatggtgatgggtgtgctcaacatcaccgaggattcgtcctcggacggcggcctgtggctggacccggccaaggcggcacagcacgggcgcgacatgatggccgccggcgcggacatcatcgacatcggcgccgaatccacgcgccccggcgccaagcgcgtgtccgaggccgacgaattggtccgcatcaccggtgccgtcaagacattgattccggccggtgccatattgtccatcgacaccacgcgcgcatccgtggctgccgctgcgctgagcgagggcgcccagatcatcaacgacgtttccggtggcacgctggatgccgaactgccgcatgtggtcgccgaccacgactgcctgtacatcgtgcagcattggcgcggttggctcgccggctccaagggcgcgaaccccgatcaagacacctccgtctacgagcacggcgcattggccgacgtacacgacgaactcatgcgccaagtcgacggtgtgctggccgccggcgtaaagcctgagcgcattatcatcgacccgggcctgggtttctccaagcccggcatcgagcacaacctgccgctgctgaccggactcgagaccttccgcgccactggatatccggtgctgatcggccagtcccgcaaacgcttcatctcggcgatgcttaccgaggcgggcgctgccggtgctgatgggccgatcatggcccagcgcgatgatgtgaccgcagccttgtccgccctgtccgccgaacatggcgcatgggccgtgcgcgtacatgacgtggccaaaagccgcgccgccgtcatcgccggcaacacctggcgcgaatacgcatgattcccctggcgccctgttttggttgcttctaggccttggctcccctcgggcgaggggagctggctccgaaggcgaccgaggagagcatttgagcagaaagccttaccaatggacaccatcacacttaccggcgtacatgccaacggcacccacggtgtgctcgcctttgaacacgaacggccacaaaccttcgtcg

SEQ ID NO: 3085 - DNA, 7327 bp, Unknown
  R19_24m  MAG No. k141_41173
agcgtgccgtcggagaagttcatgccggacagcagctcttcgatattgaagtccaccaacgtgccctgcgcggcactgtcgattttgggcagggcgttggtcgcggcgtcggcggccgcgcccagcatgccgcgcaccgctttcacgtccgaaccgtaatatggcacgtattcggcggcctgccatagcgcgccctgggtttcgtcgtgcgccgtgacgatgtgactgccagcgctgtccatctgctcaagcgcctgcttgaagtcgccctgcccgacggattgctgtgcttcagccgcatattcgcccgcctgctgcgcctcgccgatcacccgttgtaccgactgccagaatagccagccggaaacgcccaccgtcagcagaatagcgaccagtattgcaataacaacagtgccgatatgtttgcgcttagccataggaccaatgtacctgccactctgaccagtattatttacggattagcatcgtggcctgggcctcattctggctcatcggtatgttattggcgatgcgtagcggtggttatgcaagtgtcttttgattgatatcggcgcatgacaggtgaataacgtgtagcgggaaagcacgtctatggtcatattggcgttctcggcacagcaataaccgcggtattttttaaggtttgccaattcttccatctggtatgtgccgaacatggtgctgtcatgcgattgcttgacggcatattgcctagcttgaacgatacatcccattatcgattgcggttgacgttgcgtaaacgtctatcctgatggcaacgccgcgaaacacgcacggcgggtagaggataatcggcttcaagggggatgatcgatcatgaacgagaacgacaacacggcgaacgccgtcaacggttccggcgcgttcgatgtggagggcaatccgctggatacgggccggttgtggcccattgatcaggcggcattgatcagcggcgtgacgacgcgcacgttgcgctactgcgacgagaccggtctggtcaagaccgcccgcacccgggcggcacagaatcaaaccgcgaccgtgatgaacgccatgccgctgtccggctcgttcggggccattcgctccgcgctggtcggcgatccgcgtttcgccgacccgtgtggtgaggcgctctacggcagcaaggcatgcgccgacttcgtcaacgaagccaagaacatccacgcacggcaaatcgccgaacggttcgcggcggaacaggatgtacggaatcagccgaaatgacagggcgtccggctccgattgcgcgacgaaccctgcgaccacgtcaccggcttaatcatccaagctgcgcgaagcggcgcaaaagatgatgagtcggcataagcggcgtagggttcagtctgcgtgttttgcacagtgagttacaggtcctgaacgttcatacgggccagctcggcgcgacgattgatcttgtcacgctgatacaagtagatgccggccagcacgatggtggatacgttgttggacaggaacgcgatgaatgcggaaagcacgacgttccacatgttgccatacgcaccgatgtccgccctggcgaagacggtaatcgccgccacaagcgacagcagcaatgtgatggcgggcaataccagaccgggccacttgctgtccatcttcgaaagcctgatctgcaatatgatgaagccgatgcagatggcgatgagaaacacgaaaaacactacggcaaatattgtggcgccaatcatgattactctccttgcttgagctgcttgcgatattcgctgatgaggattttggcggtgtcgaagtcgagcttgtcgtcgaccgcgagccgtttgatgagcgcgatatacggctcgttctcgatctgctcgcccaacttgattttctggatgagccggtcgagccgaagccgaacggtggggtaggagacgtcgtactgcgcggcgacctccttcatggagcctgatgcgagcagaaaccgtttgatgaacgtcatatcctcgtcatcgaggttcgacatccacggcgggatcatcgtcgtatccatacctgcctccttcaattcacggcgggtttaataaaattaagtataccataaataatattaaaatcaaatagatatctgtttaaagtttttcgtagattagtttgaggtcgtgatgtaagaatgcgtacgcggacgcgaaggaccggcacatgtcggcacgcatgtagaagcatcggtcaatcggatatgcatcgacagcaccctaaggcattgacggatagccgattcctgtcatgcgatcgcttgacagcatgttgtctgattgactctttgagtgccataattgagatggcatgcgtacgcgtcggactttatggaatgcggggacgatatggttgcggacgatgaggtgcgggcctcccatggtgggcgtcggaatcaaggtctgctgtggtttttcggcgcttccgccacattgggcgtggccgccgtcacggccatcacgtgcgccgtcatccggtacggctggaatgacggggagttctggaagctggtggtgccggcggccgtggcgttggtggcggccatcgtgtgggcggcgctcggcttcatgcgtcgcgccgggcggacgcctgacgttccggccgacgcgaacgataccagcccggccgaatccaggttcgattcggcggccgcccagattctggcgatcgtcgccatcaacgtgtggggcgtcatgttcatcgtcttcgatacgttccagattgacccgtggcggtacgtgacatgggtcgtgcccgtgatgttcctgctttatctggcggtcttgggcatcggcagggcttgtttccgcaaacgacagaaggatattcgcttcccggaggaaccaagtatgacgagcagccgtccatcatacttggcataggcgggcagttggacgatgccgggcaggtcctcgttgtcgctggtctggttgagggcatattgggtgccggtcatggaacgctactggaatctgtcaccctagggtgtcactttccgtgtttacctcgacctgccatgcccctggcgcgaaggttgagaaaaacggcgtcaactttcacgacagggggctacctcatgacttggcaaaatgccggcacaccgattcaggcgctcggactggtgaaacggacagggttcgatgctcgaaccgcctcccgacccgcaaacacgcagactgttctcaataatgtttcgttggatatcgatggagcgggcttgacggcgatcgtcggtccgtccggcgcaggcaagacctcgctgctgtatgtgctgtccggattggacaggcccgattccgggcgggtgaccatcggcggtaccgacgtctacgcactgaatgaggaacggcgttcgcggttcattcgcgggcatatcggtttcgtgttccagcaatacaatctcgtgccgtatctgacggtcgaggagaacgtgatgttgccgctctcgctcgcccatcgcaaggccgactacgtgcaggtcacgcagctgctgtcccggttcggtcttcgccagagggcgaagacgacggtaagcgccctgtccggtggcgaacagcagcgcgtcgccctgtgccgtgcgctgctcatgcgtccggcggtggtgttcgccgacgagccgaccggcgcgctcgacaccgcgaacagcgagcttgtgctgcaggtgctgcgcgagctggcggatgcgggctccagcgtggtcatggtcacgcatgacacggatgccgccgctttggccgaccacgtgatcttcctgcgcgacggtcaggtcacccacatcgctggcagactcaccgccgagcagattgccgatggcatacgccgcactttcgtaccggccgggtcgccgccgttggttgcggcggcgcggtctgtcggcccgatgatggtgaacgcccagcctatccaatccgtccaaccgggccgaccggtccagcgcgtggcgtatccgcagcagcggaaggaggctcatcgtggctaggtatgtgctgcgtgtgttccgcgacaatgtcacgggatgggtacccacgattctggtggtcgcagtggtgaccacgctggtgggcatatgcatgaaccaattcgtgtggacctcgtctccgtcgttcacattggccgcgcggcaggcgggtcttgatccggccgagttcggcatggtgtcggtcacgatctatgtggtggtgtcattactcgcgttcttctcgttgacggtggtcggctcggccacggtcaaccgtattcacagcacgttcgcgcaatggcggcttatgggcgccagcccgagtcaggtgcttgccagcatgtggatgctcgtgggtgtggcgagcctgttcggttccctgatcggctctctggctgcagtgccggccagcctgctggcggttcccgagttcaacgccatggctgcggaaagcttcgccgatggattcggctcgttcgcacctcctgcgttcacgccgtcgatggccgcgtggctcggatccctgctgttgggtgtggccacgtgcatgttgggcgcgtccatcccctcgctgcgcgcagcgaagatccgtcccatcgaggtgattcgcggcacgggagccatcgggatacggcacggttggcggtcttgggcgcactgggcacttggtttgattgtcatggcggcggcgctggcattggcgttctccggcatgggcacgccacgggcgctcgcgttcggccaggaggcggggcagacattcaacagcgcgctgtgggccggcatcatcgcctcgttcggcatgtacatccttgtcagcatgctgattccgattctgttgggcatcggacgtgtcgtgtgtcgcctgtgcgggtccgcgaccggcgtgctcgccgcccgttccgccgaggcgaaggccgccagcaacacgaacacgattgccccgctcgcccttgccatgggactgtcggtcaccctgctgacctgcgcgcgatcctatggccggatactcgccttgggcggccatccgaagagcctgaactacgcggactcgctgctgctcataacgatgctgtgcatcgtgtccctggccaccagcatggcggtcatcgccctgtcgaaccgcagcatggtcgccgaccaggcattgctgcgcagcatcggcctgtccccacgtcgtgtgatccgcatgtatctctggcagagcctgcagctggccgccggcgcggtcattctctcgctcatcccggtcgccgtcagcgcaagcgttttcgccgcaagatccgcggcgctcgtcggcatccccgtggccgaaatcccatggccgggcgtaatcggcatgggcacggcctgctggctggcattgttcctcatccagttcacgcagattcgccccgcgctacaccgcagcgtggccgacacgatacgcacatgctgacatgcacgcaacatcatacaaaaagagccacaatgggagccatgaaaccgcaatccgcgcaggccaataaggtcacggtcctggccgtgccactggtcatcgccgtggtcgaatgtgcagcgatgctgtgggagcatgcgatcggagcgccggccgacaccatgtatacgtttgccaaagatccgctgggattggctctgctgctggcgatgaccatagccagcagtgcgatactgcttgtccgttactggctgccagccgttgccttggcgcttgaagcggtattgttaatagttgcctcgtactggcggttggactcaatcgtgatgattcagacgctcgtcgcctgctatgcgttcgcccggacagcgagggggcgcgggctgtgcgttggaggcatcggcatgatgctgtcgatgaccgcgtcggccatcatggtgcatccggacgttctcgcgaccgaatgggtgagtcgagtggtaacgttggcagccgtgggaggcggcgcgcttgcagtacgtggcaggcaacaggccaaggaagccgaacacaaagctgccgaggaatgccggcgggcagccgagctggccttccaacgcgatgccgcaatacgccgttcgcgcatagccggtcaactgcacgacagtgtgggccaggatctgaccgtaatcatcgcactgtctgagggtctggccggcaaaaccgatgacccacgcgtggaggatgcgctgcacggcatcaacgaaatcgcacgagagagtctgggcgacacgcgcaaagccgtccgcgcactgaccgagttcaatggagcggcgaacggtgacgatacgcacacccaagaatcagaccagcattcatgggatgacattcggccgattctcgcgcacgcacgccggctgggcatcgtcacggtgttcaccgagactggtacgcgcgccgatgacgaagctcaggctgatttgtgtttcgatgtgactcgcgaagccatcaccaacgccatacgtcacggacagaacgtggtgcatatcagcatcgcctggaaccacagcgagaacggcaccgtcgccgtgattatccgcaatgacggcagtcccgcgcgcaaggacgcgcgcaaggatgacggtactgggctcgtccgtctattccaccgcgtcgaatcggcaagcggcatcttcgaatacggtccaaacgaagacggcgaatgggtcgtcgaggcgaccatcccgtccaacggagtgaacgaaaaggaccacaccgcatgattcgtataatgctcgtagacgaccagcgtttcgcgcgacttggcttccaactcatgcttgacgatgcttccgacatcgtcgtcactgcccagtccgctgacggccgatccgccatcgagacgctcgaacagctcgccgttcagcatcgtccattgccgaatgtaatcctcatggatgtgcggatgcccggtatggacggcatcgaagccactcgccgcatcaccagacgctggcccaccatcagcattctcatccttaccacgtacgacgaggacgattacgcctttggcggtctcgacgccggagccagcggcttcctgctcaaggacgtcaccaagcacaacctcatcgacgcggttcacgccatcgccaacggtgacgcaatactcaccccacgaatcaccagacaagtgcttgaacgaggcgttccgcatcccaccagcagccagcgccagcaagaaatgcgcaaagctttcgacgcacggggctgcggacgttttcttggagactgagcgaaaggattttcgtatgttcagtcccgaagaacgggagcgtgcggtggagttgtatttcaccacgccgatgaccacggcccaggtggtggagcatctgggatacccgacc

SEQ ID NO: 3086 - DNA, 7470 bp, Unknown
  R19_24m  MAG No. k141_42081
gcggttgcgctcagatttctttcacgttactcagcgaccgtccgtgtaacgtgaaaattacgccggattggcaagcagcgcaatgccgaaaccggcggccacacaaatgagaggcaccgcgacggttgctattccatagcccagagccagcgtaaaacgacgctggcgaatcaatgaaaccacttcgttgagcgccgtggagaatgttgagaaaccaccgagaaatccgacaacgaacatcatgaccgtgtccatatccaccgattgcgaatagtaggacatcatggcgatgcccgcgcatagcgaggcgacgccgttgatgacgagcgtggatagcgggaagttgcgattcgttcttcgattctcgcggttccagccttgttgaattgacacgtcgagcacgtaacgggccatggctcccagaccgccgaacagacagatcatccacatcatcagcgcacctccccggtagtcgggtcggcgacaagcgaaatctccgcagtgatcggtttgggctcgaagctgggtggaagcgggttggccggctgctggattggctgcgactgctgctggggctgctggattggttgcgactgctgaatcggctcgggcagctgccccaagtctgaagtatccggctcgcgcaacaacggctgcgatgactgtgtcagctgaggaacgaccagcggaggaatctgcggaacgcggcctgtctgcataggctggctggcggtcggcggcacggttggtgtttcgactcgcggaacctgtcccgtctgtgcaatctgctgggccgtctgcgcggcttccattgcggcctgcgcggcagaacgcgccacgtcggccactttcacatggcgtacgccctgcgtgtccgattcggcagaatcggacacggaaacagctgaaaacgcaccccgaacccgctttcgagtactccgtgacagcagtgcctgcatcagaaccacgccggcggcggcagtgagcaaaccgcctgcaaaatttcccgcaagatagccaagcgcactggcgatatgccgctcgtgcagaccttccatcgtttccagcatcacgccggacatcgtcgaaagcccgccgagcaagccgagcccaacgccacggctgacaacctgccgcacccggcgacgcagccacgaagcggtcgccatgaattcggtcagcatcgcgaacaggaagcaggcgaccatattcgacacaaacgtgcccacaacgaatggcgtcccgctgaccgacggcaggagcatatccaacgcatgccgacagccgactccaacaaatccaccgacgaacaccacaacatacatcagtccgtcggcgagcggattgaaccgcgcctgcatacgtttcatcggcgccaggggaatcgtaggcggatccatggtgttagcggcgggcgcggttgcaccagcatgcgtcacctcaacagtgtcgattgcctgcgtgatgggatgtgagtcctcacccgcagtcaccacgtctcccggcgattgttcttgcgattccattgcgctccccctgtactggccttccgcggacagcgttgttccgcccataggccgtgcaacaacgagctgggccgcggttgccaccttcctaacgcatatgagtttacacggagcgccaacgtatgcaccctggatgtccgattccgcaaattcgtacatccagagtccagccgaattcagccaggctcagtcaagccgggcatcacacagccgccgcatcgcaggtcgcacctcgcgctcctcctcgccactgaacagcaccaccagatagtcgccggcacgcagccgtgtatcgccgcgcggcacgatctcgctttcgccgcgacgcaggccgatgatcaggcacccagacggccaacgcacgtcacgcacccgcttgccgtccgcaatcgctcccatttccaatggcagttccataatgccgctgcccacatggcttgcgatcgccatctgcatgccttgcgcgcgcacgtaccgctccagcaactccccataaatcggtttggtgcgcagcagatcggacaccaacagcgcgatgaaagcgacggccgcgaccggcagcatgtgcgtcaacgttccagacatctccacagccaacagaatcgacgtgatcggcgttttcacggacgcggcgagcgtgcccgtcatcacgcacaccgcaaacaccgccactgcgtcggatggcagatcaccgaatcgatgcaacgcttcaccgcagatgccgccggccaacgaaccgaccgcaagaatcggcatgaaaataccgccaggcgcgcctgagccgaaactcgtggatgtgaacagcatcttcgccacgaacagcagacacagcattcccaagccgacgcgcgcatgttcggcggtatcaatcagattcgagccgccgccgagcacatcgggcaaccagatgccgacaggcaacgcgatcgcaatcgcaatcatcgggcggctccatgccggcagtttgccgtacagcgtctggaagccaagcaacgagcggttcatcagcgaaccaaccaaaccggccaccaatcccaacggaatcagccacacatactcttccaacgacagctgaccgatatcaccgaaatccaaaaccggacgcagaccgaaacagtattttgagacgaaatcggcggtcagcgatgcggcggtggcgcccatcagaatcgcaggggaaaaactccgatgcaccccttccaaagcgaacatcatgccggacagcggcgcgctgaacgcggcggacaagccggccgcggcaccggcggtgaccagataatgctcctgcatgtcctcacggcggcggccgcgcaaacggtgggatacacactgcgcgcccgacgcaccaatctgaatggacggcccctcacggccgagcgacagaccaaacaacgcgcccaacagtccaccgacgaaacggactggcagaatcgtctgccaacgcatcttcaagccgcatatcaccacgccgttggtctgcgggatgccgctgccaccagccatcggctccttgccgaccatccacgcgattgccagcgcggccgccaccgcggcaaccgcccacggcgcaatcagccacggggtctcgcgaatccgcgcatatatccaacgggacgcatccgtgccgtattcgatgccgagacggtatacgacaaccagcaatcctgaaaccagaccaatgactatgccggccgccgccatcttccacttcaagtggtcgaatcgcggaatcagccggcggatatcatgtgccgcgtcgttaccagtcaagccgggaaattcgttgcagacggtcagtcgaccagcgaattgatctggatgacatgatcgcgctgtgggccggtgccgatcacggagatacggcagccgctcagctcttccaaacgcttgacgtaggcctggcaggtggcgggcagctcgtcgaaggagtggcagtcggagatgtcctcatcccagccgggcatggtctcgtaaatcggcttggcggcggcgaaagcggcctgatcggtcggcatatcgtcgtgacgttcgccgtccacgtcgtaggccacgcagatcggaatctccttcaggccggtgagcacgtcgagcttggtgagcacgatgtcggtcaggccattgacctgggaggcgtaacggttgacgaccgcatcgaaccagccgcaacgacgcggacgaccggtggtcacgccaaattcgtgaccctgctgacgcagccattcgccggactcgtccagcagttcggtggggaatggaccttcgcccacgcgggtgacgtaggccttggagacgccgattacgcgggtgatcttggtggggcccacgccggtgccggtgcaggcgccgccggcggtcgggttggaagaggtgacgaacgggtaggtgccgtggtccacgtcaagcatggtggcctgagcgccttcgaacagtacggtcttgccttcgtcaagcgccttgttgagaatcaggccggtgttggccacgtacggcttgaggcgttcgccgagcttcagcagctcctcggtggtctggtccacgtcgatcggacgacggttgtagagcttgaccagcatctggttcttctggtgcaggctggcctccaccttgtcgtgcagatggtcggcgttgaacaggtcatgcacgcggatgccgacacggttgatcttgtccgcgtaggccgggccgatgccacggccggtggtgccgatcttgtgcttgccaaggaagcgttcggtcaccttgtcgagtgtgcggtggtagggcgcgatgatgtgtgcggcctcgctcaccttgaggtgggagcaatcgatgccgcgggattccaggccgtcaatctcctcgaagagcacttccgggtccacgaccacgccgttgccgatcaccggggtcaggttcgggttgataataccggaaggcagcaggtgcagggcgtacgactcatcgccgaccaccacgctatggcccgcgttgttgccgccgttgaagcgcgcgacgtaatcgaccttggtgccgatcagatcggtagccttgcctttaccctcgtcgccccactgagcaccgataagaacaattccaggcatgatgcacctccgcattcgcacgattccgccggaaacagactaccttacaccctctactcggggcgcggccatctcacgcaatcgggcttctggtgtctttgccgcgcgttgcgcgaggcgggccgacaccaaggcgccgccacggcgaatgacagtttatttgggtgttatctgagtgctttgccggccgagccgagttgcttgcatgcctcagccacgcgggcggacatggattcctcggccttgcggccccaggaacgcggatcgtagaacttcttttcgcccacttcaccgtcgatcttgaggaccttgtcatagttctcgaacacatggtcggcaatcgagcgcgtgaacgagtattgcgtgtcggtgtcgatgttcatcttgatcacgccatggctcacggcttctgcaatctcttccggacgggagcccgaaccgccgtggaacaccaattcgaacggcttgccgttgggaaagtcgactatgccggcggcgctgggcagctcaccctcgaccaccgcgcgcgccacacgggactgaatatcaccgagcagggcgggacgcagcttgaccacgccgggcttgtaggagccgtgcacattaccgaacgtgaaggcggccatgtatcggccacgctcgcccaaaccaaggcgacgggccacttcaaggccatcggccggcgtggaatagaggcgttcgtcgattttggcggaatagccgtcttcctcgccgccgaccgcgccgatctcgatctccagcaccgtgtgcgcggcctgcgacttatcgagcagctcctcggcgatgtccagattttccttgagcgacacggtggagccgtcccacatatgcgactggaatgtgggctcctgaccatgcgccacctgatcggtctcatgtgcgagcagcggtcgcacccattcgtccagatactgcttggcgcagtgatcggtgtgcagggcgatggtgatgttcgggtacttcgcggcgacctcgtgtgcaaaagcggccaaggccagcgatccggtgacacggtcgttgacgccgatgccggaaaggtatgcggctgcgccgacggacacctggatgatgccgtcggattcggcatccgcgaaccccttcagcgcggcgttcagcgtctgcgagctggtcacgttgatggcagggtaagcgtagccgccgcgtcgtgcggcgtctagcatttcggcataacgttccggtgttgcgattgtcatggcttcattatcgctcggggtgtgcccgccagactaggttctggagccaggcgagctgtgaactatctcacgaggaacaccatgatgataatcatggcgaagccgaccaaatcggtcggggtaaagaccgcgccggcgaataggacaccggtgatagtggcggttacgggttcactggtgccgagcatggtggcgcgcattgcaccgcagcgctgggtgccgccgaggaatagccaataggcaccgaatgtgccgaacaccacggtgaataccatcagaccaatgccgaaccagtccaacgcgggggcggtggtccacgggcgcacgagcggcagcagcattaggccggaaacgatgaacatgacgccgctggccatgaagttgccccatttggccattaatgcgatgggcagaatcgcaagcagtgacgtgcatacggcatcggtcaggccccacagcagaccgggcagcggcagactgagctggctgagatcgccgcctgtggcgatgagcaccgtgcccacaaaagcgagtaccacaccgatgctttcgcgtttgccgggcagccgtttgcccataatacatacgaatacgagtacaaccagcagattgagcgtctgcagcactgtggccgtgccggaattggtccagtcaatggccttcaagtaggagacctgcaccatgagcacgcagaagaacgcgcacagcaggagtctcgggtaggaacggtagtccttaagcgagttgatgaacttgtcaggcgtgaagattcctgcgcaaaccagaaagatgacaccggccaatagctcgcgcacgcaggcgatccacagcggatcggcgtgatagtcgttcatcaggagtttggagacggtggcgttgacgccccagaagacgcctccggcgagcgccagtccggcaccgacgaagatgtcgtgcggggtgcgttcgagggttggcgttggttggccattggttgcagcggtcttgggttcacacatcgcccatcacgatacgcggacgacgtgaattgttctcatatagcggtcatacggcaggaaaataagctctcaaaagagggaaaaccgttgaaatttcaaggaaaatcgatggagcggacgacgggagtcgaacccgcctctaaagcttgggaagctttcattctaccgatgaactacgtccgcatgtgcgcttccacgcacgagaggcaagtgtatcacctatgcggcaccttgcgccatgtgccggtttgagttctgtgctggactagtgaattgcgcgcgtggaatacgtggatgcggccaccggagtgccgttcatttcattggccatttgcatcaggcgtgcgatgcgctgatcagtcggcggatgcgtggagaacagtttggagaaaccgaccgcggagaacggattggcaatcatcatcgcggagacggactgggtgccggccgttttgcgcataggcgtggtctgggcaccataggagatcttgttgagcgcggaggccagggcctcggggtcgccggtcagcagactgccgtcttcgtcggcgtcgtattcgcgagtacgggagatggccatctgaatcagtgatgcggcaatcggcgcgagaatcacgctgaggagcacgcc

SEQ ID NO: 3087 - DNA, 4033 bp, Unknown
  R19_24m  MAG No. k141_42623
attggaaagttgcggtgtgtagggtggtgtctttgccgagagtacagtgtttctcgaaaaatgcggtgcatgcgatatgtttaatgtaattctaaatattacattaaacatgagtgagcttcccgaattcaatttgtaagtgcaacgttcgtctttgggtagcttgtcttcgacattagcttgccgagttcgcggtatcaaacctcgttgggtgtttcccagtccaggaccttcatgggggtgtcgttgatctcgtcgacgatggcctgcaggtcggcgtccgtcaggccgtcgaaaccggtccttttgggcaggtagcggcggatgcgcccgttgcggttctcgttcgtgccgcgctggtacgaggagtacgggtccgcataataggtgagcatgccgagcgactcgtccacgagcaggtggcaggaggattcggtgccgttgtcccaggtgcggtcgatgcgcgcgggcgcggggatgtccttgtagatgtcgtattcggcgcgcgccgtggccggcgcgctcttgtcggggatgaggcgggcgaacaggcggcggctcctgcgttcgacctgcgtgtcgatgcaccgcctcgacggggaggcgccgatgaccgtgtctgactcataatggccgaactcgcggcgcgagtccacgcgtttcggacgttcgccgatcggctgtgtcctcagctcgtcgatccggacacgttcctctgccgacaggtgggaatacactctcatatcgagcgcgacactttctctctggttatgaacttgaacactttcagccatagacaggtgttgcgcttctatttagaactcgggcggtctatcattgcatctgtgtttcgctattgtggggaggcgtcgtaaatgccgattgtcgcgggatttcggccgttttgtgatgcggtggcgacgtcgtggcggacgagtgcgtatgcgttgcgtaggcgtccggtgcgtacggtggtgatgtggctgtcgatgttggtgatgatggcgatgccgtcgttgcaggtgtggctgatcggttgggcgtgcggcccggacgggcttggtatggggtcggggctgggcgtgggccggttcgcagtgatcctggcggtgctgacggtgggcgcggtgttgatgtcggtgtcgtcgtcgttggcgcagaacatgcgtgacttgttgcaggagccattgatggccgaataccagtccgatctgaccgacgcgctggcgcgtctgactcccgcgcagacgttggacgacgaggtgacgacgcaggtgcgggccgcgcgcgacgcgatcccgtacaacgtggcttcgcaggccgcggacgcgacctcagtggtgggcgcgctggcgtcgatggtcatgctggccgcgtccttgtggcatatgcatccgttggcggcactgatgatcgcgttggcgatggtcccggagctgttggcccagttcggcgtggagaagctcacgaacgagttatggcccaagcgcggcagggagtcgcgtcgggcgaactatttcgagcggttgttggattatccaccgtcgagcacggagatcgcggccacggccggttcgttcggcatccctgcgcaggcgcgcgtgcgctatttcaatatggccggcatgtgggagcgtatctcgtggcgcacggtgcagttgaccggtgtgagttcgctcgtgttcgccgtgctgacgggcggcgcgttctggctgatcctgacgtccggccatgcgtccgtgtcgagcatcccggccgcgttggtgggcatcatgacgggattgtcggtcacgcgcaccactggcgaggcgttcggcaacctcatggcgtccacgccgatgattcttgcctacgaacggctcatgggcctgctgcgcgcgaaccccgcgatccccgaaacgaccggtccggtcggcgtgcacgtggagcatctgacgtacgcgtatccgactgttgcaaagcatgacgatgacgcggatgacgcgtcggcagcgtcggttccggccgttcagactccggcgttggacgacgtgtcgttggatgtcgaagcgggatcgatcgtcgcactggtgggcgagaacgggtcaggcaagaccacgctcgtcaagctcatcgccggcatcctcgacgccccggactgcaccgtgaccctgccctcgggcgcggacggcgggaacggtcgtaccttggggtcgtgggccgaacggttgggcgcgtcgagcatggtgttccaggatttcacgcacatcgaggtgaccgtgcgcgagttcatcgatcccgctctgcggcaatcggacgatgagttatgtgacgggttgcgtcgcgcccgcgcgctcgacatcgtggatgggcttcccggcggcttggatacgcagctcggtcaggagtggggcggcgttggcctgtccggcgggcaatggcagcggcttgcgctggcccgcacgttcctgtccggcaagccgttgtggatactcgacgagccgaccgccgcggtcgacgccaccgccgaggccgcaatctaccatgatctgatcgccaaccgtccggcgggcaccactgtgatcgtcatcagccaccggccccgcgtgctaaccggcatggaccggattatcgtcctcgaccacggccacgtcaatgaaaccggcacctaccgtcaactggtcgaccgcaacggcaccttcgcccggctcgcacacgacagcctcgaatgagctcgatggcatatccggttgattgttaaaaactcagtggccggccgacagattcgtccgacgaggctcgcgcgagtgatcacaacgcgggtcgcgtcggatatgcgggagatggcacgccttatatcaaaagcgatgattttcaaataaggacacggccccatcagccggtcgcgggtactacagtgaaccacaacgttcctcccccgatggtttggggaaacacagaaagaggttggtcgtcggcctgatcatcattgcgattcgcaccggcttcttccgcaagaagctgggtgccagcgagaaccttcaggagtatttcgcctgaatcgggcttgtcgtccatccgcattccgcctcagctactcatatcgataacttactaacaatccattcattgtcttcttaccagtaaaggaaatcgccatgtccaacttcattcccaacaccgtttccgcagaacgcaagcccgtggacatcgtcaccggcacctatgtggactatgccggcgtgacccgtgccaaatccgttcccgcccgcaggcgtgaagccttcgaacgcaacggattgggcgccgccctggtctgggtggtgttcggcgcggacaactcgttcgccgaaaacgagaaattcaacgtgtccggcgatctgcgcctgcaccttgacacttccgcttctgcattgcgtgccatacgagcgtgaagcggcgtttctctgctcggtgcatgccaacgtatacatggatgtcagccttgccaatacgcatatgggagcgcaggtgagggaagtgctgcgcaatgttctggcgtggtgcgcatttgacaagttgctctatgcgtcggacggcgtcggcatcagtgaattgcattatctggccgcggtgctgttccgcaggtatattgcgcgaatcgccatcgactgggtatcggatggcgcatggaacgcgaatcaggcgaaacgggttatcgacgccatcgcgcatgccaacgcggaacggctatacggtttggcgtgaacgggtacttcgccggtgccgtcacttcccgaggaacgccgggatggcctcggccgccgcatagcccttgcgatacatcatttccaggccctcgaagttcttcttcagggtgttgagaccatacaggtcttcgggtgcgaggatcagcactttgccttccgcctcgtaatgcttggcgagttcgagttcgtcgttgtaggtcttgtaacgcatgcgcagcttctcagccgcagcggggtgggagcgttcgagaatgcgggccggagccagatccttctgctgcttgcgtacttcgtcacgcaagcgg

SEQ ID NO: 3088 - DNA, 6632 bp, Unknown
  R19_24m  MAG No. k141_43447
cggcatcgcacgtcgagttccttgccgtcgtaggtggcttcgatcacgcacggcagcgcacggacctcggccatcgccgaatccgccagatcgagcgtttcgatggtgatgcgctcgcccgtgtcgatcatgttcttgagctcgtcggcggttccgagcgccaggtgccggccgtggtccatgatgaggatgcggtcgcagatctgttcgacctcctccatgtagtggctggtgtagatcaccgtggcgccggcctggttgagccgctggatgccttccagaatcgaattgcggctttgcgggtcgacggcgaccgtgggttcgtcgaagaagatcaggtcaggcttgtgcgcgatgccgcaggcgatgttcaggcgtcgcagcagtccgccggacagtttgccgggccggaacttgcggaagtcctggagaccgacgaattcgatggcctcctcgaccagcggcgcacggtcagttttcttcggcacgtacagcgagcagaagtagtcgatgttttcggtgacggtcagttcattgaacacggccacgttctgcggcacgatgccgatacggcgcttcagcgcgtaggaggtcggcgtcatcggctggccgaacacgcgaatcgtgcccgaatcgtaggtgagcagcgcgaggatgcagttgatcgcggtggttttgccggacccgttcggtccaagcagcccgaaaatctcgccctggttcacgtcaaggtcaaagtagtcgagcgccaccatgtcgccgtagcgtttgaccagttggctgacgtgcacggccagggccgggttggttgtcgagtcgtgttcggaagctctgttgtcggttgccatagccactcccttccttggtgattccatcatcccaagaaggggccagacgccgccacaggcaaacgtcacgacttggccgcacaggcgtgacatttgtcattacagtccttcggcgtcggtctgcatggccttgtacaccttatcgaccggcatcaggctgatctcgtccatcgaatagttggacgccctgtggctttgcgcaatcatcggtatcatccctttacggttgtgtcgacaacatccgacgcttgtgcctcatctattcgggaagtgtagacccgttgtcttggaccgtcatgcgaataattccgcacgcccgtcaagttcgtcgtgttccgcacaccgctagactggtggtggaagagcgtcgagccggggaggtgccatgcgcgtgttggccgagaagggcttgctgctcgtgttgggcctggctttggcctggcttgtcggggtgcggctcgatggcgtgttcatcgccggcctgctgttggccgtttccgtcgccggattggtggaatggctgcgtcccgcgcaatggtcttgggtcttgtgtacggcgtatctcgtcatcgccgtggcggtgccttcatggtgcgcgttcatgccgctcatcgcctacgatactgcacagctgccggccctcgcctcgaccggagcccgggctggggcacggactgcggcaagcggccgctcccccagtgtctcgcggaccgcggcctctcgccgttcccttgccgatgcaatacgttcggccccgtggctttcggtcgccgcgcgctggatatgggtgttgccgccgatcgcgctctggttcgcccgtggcaccgaccgtctccagacgctggtgatgacgatggtcgccctgcttggattcgttctgggccgggcccgcgcctcctcggacgaggcgcggcgcgcgttgctgcacgcgcaggacagggcgcgcgaatcctcgcgggccactcgttcgcgcatcgccgacatcgatgaggaacgcgcccagtcgattcgcatggcgaccctcggcgagcgcacgcgtatcgcccgggagatccacgacaatgtgggccatctgctgacccgcgcgatcatgcaggcgcaggccggcaggacggtggccgaggcgacgaacgatacggtcgccgcgcaagggttcgccacgttgggtgcgacgttggatgatgcgatgacgatggtgcgccgttcggtgcatgatcttgaggatgacggcactgatttcgccgcgcagatcgatgatgccgtcacgtcgttcgacggcatctcccccggtttcgccgtgacgctggccaacgacatcgccaaggcgcccgcgccggtctcgcgctgtttcgcgaccgtgattcgcgaggcattgtcgaacgtggtgcatcatagtgcggcgcgcgaggcgagcgtgacgttgcgagacttccccgcgttctggcagttggtcattcaggatccggggccggccgtgtccgagtccgatgggtcccggacggccgctgcccgcccgcgtgcgatgcgtgccacgctcgtcggctcgcgactcgccgccgacagtgttgccgatatgcgcggttcggccgatgagctgatgcgcggcatgggtttggcggatatcgaatcgcgcgtacgcgcccttggcggcaccgcggtctgcgggccgtatgagggcggctggcgtgtgttcgtatccgtgccgaagaagcgttggaccatggaatcgagggattgatgagaatcgcaatcgtggatgatgatccgatcgtctgccagtcgttggagacgattctgacggccaccggcacggccgaggtgctatggacggcaaatgacggcgacgccgccgtgcgccgttatttcgagacgccggcgagccgaccggacgtgctgctgatcgatattcagatgccctgcaccagcggtttggatgccgcgcgcgaggttctggccacggacccggccgcgcgcatactgttcctgaccacgtttgcggaccagtcgtatatcgcgcaggcgatggggcttggcgccaagggctatctcatcaaacaggatgtggcggcggtcgggcctgcgctgcaggcggtgatggccggtcaggtggtgctcggcgcggaagtgctcggcaagctcaccgaacggactccgaatcctgccgattccgacgattccggagataccgccgattccatcgagggcctgcttggcgagcgtgagcgtgagatcaccgcgctggtcgccgagggcctcgataaccgcgacatcgccgccagactgttcctgagcgaaggcacggtccgcaatcgcatcagcgcgatactggacaagctcggcctgaccaatcgcacccaactcgccatcctctggctcaacgcccatcggtgaggggcctttggtcaagtaggtctctccctccgtcatcgcttcgcgatgccacctcgaacgcgattcaggacagcttgcagctgacctcttattcgctcgttgttactcacccttgcctaaaaacacctccggcgttttcttcacggctcggctcatcagagggaggttgtgaaaaaccaacctcagctgtttttcatgacgatactgtcgatggtgttggccacgcgctcgcagtcgtcggagcactgttcgaggtgacggtacacgtcatgccaggcgaacacctgcagcggatcggtgcaggtggtgtgcagcgtgcgcatcgactcgatgaacaggtggtcggcgtccgtttcgatcgtgttgatggcgaacaccagttcgcgcaacgtcttggaatgccggaatcgcggcagttcgttgaccagctcgcagatgctttccgtggcgcgcaccaccatatccgacatctggaccgcatcgtcgcgcatgtcggtcacattgtcgtagtacatgcggttgagtacgccttcgatgctgtcggtcacatcgtcgagcacgtggccaagctcgtcgatgtcctcacggtcgaacggcgtgatgaacgcggtcaccagttcgtccatcatgtcgtggcgcacctcgtccgccgacttctcaatcgcgtgcatgctgtccatgcgttcgcgcagctggtccggattgaagtcgtgcatgacctcggacagcagcttcgcggcctggcatgcgtagtccgcgctgcgacggaatccgtcgaagtagaacacgtctttttgtctcgccatgatgggtggattcctttctagaacacgaccatgaacagtttggccattacgaagctgatgagaccgcaaccggggaaggtgaacacccaggtgagcatcatgtcgcgcaccacgccgaagttgatggcggagaggcggcgtaccgcgcccacgcccatgatggcgctggtcttggtgtgcgttgtggagacggggatgccgagcacggtcatgacgagcaggcacagcgcgcttgacagatcggccgagaagccttggtatttctcgagtttcaccatgtcctggcccacggatttgatgatgcgttcaccgccgacggacgtgcctacgcccatgatggtgctgcacagaatcatgagccagaccggaatcatcacaccggtcacgctgggttggccgttgcagaacgccatgccgaggaacagcacgccgatgaacttctggccgtcctgcgcgccatgcatgaagctcatggccgccgcgcccacgatctgcgcgtaggtgaagaacccgttggtgcggcggcggtccatgccagcgcaaatcagggtcacggccttgcataccaaccagccgacggcgaagccgaacaggaggcttgcgaccagaccgtagagcaccttgacccattcgcccatgttgatgccgccgatgccgccttggatggcgatggccgctccggacaggccggcgatcaggctgtggctttcggaggtgggtatgccgagcagcgaggcgcccacgctgtatacgacgatggagaacagcgccgcgcatagggcgatgagcgccgcgttcgtgtcgccgccgaaatcgaccatgttgctgatggtggaggccacggaagcgttgagctgcgtcatgatgaagacgccgaggaagttgaagatggccgccatgatgacggcggagcgtacgcgcatgcatcgcgtggtcacgcaggtggcgatggcgttgggtgcgtcggtccagccgttgacgaagatgactcccagcgtcagcaacgttgtgacggtcagagccgggttggaaagcacttgttggaggaaatgcgccagtgagacgtccaaagggaatcaacaccttcttcttcgggggcggaagccgtcacactgattgtaacggaagaatggctacgtagttcccatggcgcgcgggttttatggtgttgttatgctgcgcgccgcgcatcctttcgtgaaaacagagcgggacagtcgtatgcttcgattcggcgcctgcatcgacaactatcgtcatctaccgaggattcggtcatgcgtgtgcgaaaatggacacggtgtcaatcaggaggtgcacagtggttgtaagcacggattcgagccgcacaatgcccgattgggtgaagtacggggtgttctggcacgtgtatccgctgggcttctgcggtgccgatatcaggcccgccggcccgcgccagttccatggccgcggccttgacgcgatgatcccttggctggagtacgtgcgcgatctaggcgcgtccggcctgctgctgggtccggtgttcgagtcggcgacgcatggatacgacacgctcgaccatatgcacatcgatgtgcgattgggcggggatgccgcgttcgaccagctgattgcggcctgccgggacatgggattgcaggtggtgctggatggcgtgttcaatcatgtgagccgcgatcatccggccgtccgggcggcgcttgacgagaccgccggacgcttgaatccggccgacaacccgtggcatggtctggtccgcgcgcatgtcggtgataatgacgaacccgctttggatgtgttcgaggggcacggggatctggtggcgctggaccattcggctgacgagaccgttgactatgtggcccatgtgatgagccattggctggatcgcggagccgccggctggcgcctcgacgccgcgtatgccgtgccgagcccgttctgggcgcgcgtgttgccgcaggtcaaagccgcacacccgtattcgtggattttcggtgaggtgatccatggcgattacccgcgcatcatcgaggaatccacgatggattcgatcacgcaatacgagctatggaagtcgatccagcatgcgctggagacggagaacttcttcgagctggattggaatctcaagcggcacaacgcgttcctgaattccttcgtgccgcagacgttcatcggcaaccatgacgtgacgcgtatcgcatcgcagattggcccggccaaggcggcgttggcattggcggtgctcatgacggtcggcggcgtgccaagcatctattacggcgacgagcagggctatgtgggcgtcaagcaggagcgtttcggcggcgatgacgacgtacgtccgaagttccccgactcccctgccgaactgtccacgctgggagagccgacataccggctgcatcaggcgctgatcgcgctgcgccgtcgcaacccatggctgatggatgcgcgtaccgaggccgtgaagctggaaaacaagcacttcgtctatcgttcgacgagcgccgacgcccagcattccctgaccgtggacctcaacatcgagcaatcccccactttcaccatccgcaac

SEQ ID NO: 3089 - DNA, 6070 bp, Unknown
  R19_24m  MAG No. k141_43591
acagcgcctcgacctcgccgcatgaccaccacgcacagttcggccccgtccggcatcgcagacgactcaacccgagtcggcctacttgccggtcggggccgttctcgcgttgtggcagagggcttcgcgggctcgatttttgcccacattttgcccacattatcccgtgaaaccgagggaatcggcgggaataagaaaagccgctcagccctactcccgcaaggccaagcggcttgtttccgccgaaacggattggtggaggcgcggggaattgaaccccggtccgatgaccgagcccacagtcttctacgtgcgtagtctgctggccaagttggcgatttttctgcccccatcgatgtcgcagacaactgatggcgagcatatccgcagttaaagtcccgatgcagccctgaggctcaactgcatcagcaagtcttctaaacgacgctcagcatcctcccaaagacgaggaggagtgaacggagcggctgctcactggttaatcctgactaaaatcaggcagcgagagcgaactcagtgcggttagatttagcacttattcttttgccggggtcatccacgagcggacccggcgttctcggcacgcttccctgcagcgaacaggtcaccgtcgaaaccgatcgcccccaatcttgagttatcaaacttccggcttttcagccggacttttcagcatacaccctatggcgctactcgcgcaaatcgccggcagcgaacatcgccccggcattgacgggaccaacgttgtcagcaggaccaacggagcgaacgccgccccggaaccaacggaaccaactgaatcgccgtcacttgatgatgggcttctgggatgcggaaacatcaatctgatgtttgccggcaaagccagccgtgccagcggtgatgttcttgtcgatttcctcgacttccgccagcttcagcttcagttgcgaggagtctccccaaatgattacgcggtcaccgtcgttaagcgtggtggtcaccgaatcctgcgtctcagcggtgaccttggtaatggacttacgcatcgattccggcaatgcgcccagaatcgccagcgcctccttcaccgaacggttcttgagactggcgtctatatccttgacctcgatcaccgggatgccatccacgttggcgttcttcaccgagttcaacacacgcgcctgggaatccaccgcggtcagggtatcgcctcttttcagcatggccgcaggccgttgcgccttgacttccacgctcatcgacttggggaactgtttggagaccttggcctcgctgacgccgggaatggatttgagttgctctgtgacctcatgggtggagaccaggaacaacgactttccagcctgcttatcggcgatggcatggatggtctgcgcgctcacccattcgttggcaccggatacgccgatctcgctggtttccagacgaaacaccgacgagaagagcagcagccacgttagccccgtcactacagccacgctgacgacagcaatcaacacgcgtaacgcaacgacacgtacgttcgcacgcttgcgttctttggcgcgttcggtgaaattcaccactttcgggcgtgatacgactcctagggagccggtggtctggtgcagcgtttcggcaacgtaatcctcgctgtgcagccgtcgtgcatcgacgaaggcaccggcctggcccttggctaccgtcacatcgtcgatgatctccggctcgtcgatctcatgcccggaagacacggaccggggagcgcgagacttcgacgagtgacccgtgtttccgcgtgaaccgatggtgcgcggcttgcggggacttccggacgaacgacgtgagccgttgtcattgcccccggatctgaccgtgcgcccggacatcactcgcagctttcccgatgggcctcaagtgcggtgagcagcacctgatccatgtcagtgatgtcgcccgcgcccacggtgaagatcacgtcgccgtggtgggcacgcatggccatcatcttggcggccaggcacatatcctcgaccggctgaatccacgtgcctgcggaagcgtccttgagtccctcagccgcgtccacgatggtggaggggctgatgtccgggaaatcggtctgcttttcacgggccgggaagatgccggtgataatgacgtcatcggctttggccaaggattcggcgaactggtgcgcgaagaacttggtgcgggagaacaggtgtggctggaagatcacacgaatggtcgaatcggggtaccggcgtcgggccgcatccagcagggccgcgatttcggtgggatggtgggcgtaatcgtccactacagtgacctgcttgaccgtgccgcgcacctggaagcggcgtgccgcaccgaggaatgtgccggccgccttggccgcgtctgcggggctcacgcccagcagcacggcagcgctgatggcggcggccgcattgcgcgcattgtgcacgccaggaaccttcagggcaacgctctgagacaccggctcccccgccgtcaccgcggccggcagatgcagggtgagctgttcgacgccgctgcctgcggtctcgctttccgaagcgatccagacatacgcggcaccgcccaaatcgggcagggattcacgcgcggtagtgccgtaggcaacggtatgggatttcacgtcggcgggcatggcctccagcacggcaagtccgtcggggtcgtcgatgctgatgatcacgtgaccggtggcccggccggcgtgggcaacgaacgcggcacggtagtgggcttcgtcgccgtaatggtcgagatgatcggcttcacagttggtgataatggcgatggtcggatggtatttggcgaagctgccgtccgattcgtcggcttcggccaccagaatatcgcctttgcccgcgtgtccaccgtccagcgtggtgccgtccgggccttggataaagccgccgatggcgtagcttggatcagcaccggcgttcaccagaatgtgggacagcatggagctggtggtggttttgccatgcgctccggccacggtgacggctcgtttgccgttcatgagcagagcgaggatgtcactgcgatgcacaatgcgcttgcctgccgcgtgcgctgcgacgatttccggattgtccggtttgatggcgctggagtagaccacggtctcggcctgggcgacattttcggctcgctgcccgaattcaacggtgatgcccagcgtttcaagtcggtcggttttggcgctgtgtgcgcgatcggagccgtccaccgcgactccttcggcgtgcagcatttcggccagaacgctcataccggcgccgccgataccgatgaaatgggtggcgccgagatccgcggggcgggccgcagcatcgaacgaggcatacgtggggtcaagcacgatgggctgatcttgagacaattcaaaactcctttggggattccagcaccctatattatgaccgtatctcgtgttgcgggacgggattggtctgtatcgcgcacgggatgatatctgaatactatttggatggttcggctaattgcagaacgtgccgggccatgatttcggcagcgtttctgatgccgtattcccatgccttgcggccgaattcggcaagtcgttcgtgatcggcgagcagatcgggcacatgctcatgcacccactgcggggtcaggtccttgtctgcgaccagaaggccgccgccggcgttcaccactggctcggcattgaaacgctgctcgccgttgccgattggcagcggcacgtaaatggccggcagacccagtgcagccagctcggataccgatccggctccggcgcggcaaatcaccaagtcggcacaggcgaaggccagatcgattcgttccagatattcggcggtatggtagtcaccttgtccggccgattcggggccgatgccggtaagcacgtccgcgccggccgaggccgtgaccagttcgcgtacttcgctgattttgcctcgcccggtcaagtggatgatttgtgcgtgggccaacaggtctgcggcggaggaggcgatggcgcggttcaggctttgcgctcccagcgatccgccagtgaccagcaccagcggacggttcggatcgacgccaagctgcgcggccgattcacggcgtacggcggcacgatcgtcaccgatgcgtttggtcagggaggcgatggtcgggcgcaacggcagaccgacacgctcgacgtcggctccggcacgcggtttgagaccggtgccttcgtacacggtaccgatgaaatcggcccaacgagcgcccagtttattggccatgccggcacgcgcattctgctcatggatggcaatcggaatgcccatcttgtgtgcggtggcgtagacgggggcggaagcatacccgccgaatccggctacgacatccgcatgccgcgtttcaagaatggagcgcaccttggcggtttctcgcttccattttgccgggaagcgaagcatgtacaggttagggcgacgcgggaacggcactttttcgatggtgtcgagctcgtagccggcctcaggcaccaaatccttctccaaacccaccgcagtgccgatgacggtgacctgtgccgtgggttcgatgtcgcgaatcgctccggcgaccgcgagcagcggattgacatgtccggcggtaccgccgccagcaagaacgatatgtggtgtgccttgattcatgattaccgagtctacttacgcgctctgacgcgactgttttatctgcggttgagagcgcataagtcccacaaccagtccggccgccgtcaagcacataatcatggatgagccacctgcggagacgaacggcataggcacgcccaataccgggaacacacccacgaccacgccgatgttgaccatggcctggcccacgatccaaatggcgacgcacatcagcaccatggcaacataacgatcggtgacctgcaatgcgatgacgatcatgcaccaggcgagaatcgcgaagaacagcaatacgatggcgcaaccgacgaatccggtctcctcgccgatgatcgcgaaaatgaaatcgttatgggcggccggcaggtaattccatttctctcgcgaattgccgatgcccaatcccagaaagcctccggaggcgatggcgtacttggcgtgaatggactggtagcatacgctctgcgcgtcagcggccgagcaatcgccatatgtggccagaatacgacgcatgcggttcgggctggaaaccgccaatgcaccgaccataaccaccgcgcccaatacgccgattcccatccatttgccggggaatccgacgatcaggaaggccacgcctccgatggagaccagaatcatggccgtgccgaggtccttgccgcccatcaccagcgccacgcctatcgcatacaacaccaacggcgcggcatatgctttgattcccttcttgtggtacatcttgctgcaggcatgcaacgacgagggcagccatatgcatatcgcgaacttcatgaattcggccggctggatagtggtgaagccgaggttcagccaacctttgttgccgtagacgtcgagacccagcggagtaaaggtcagcgcctgcaacagacaggcacccaccacaaagaacacgccggtccgtttccagaacgtcaccggcatcgtcaatgccacgaagcccagcaccaagccgatcaggcaaaacgcgccctggttcagaagctgaaggaacggcgacttgcccagtgcggccatggtgaccgtggagctggagaacaccatgatcaggccgaagcatgtcagccccaccacggccatgcggaatccgtggtagcaccatagcgggttgagcaagcttcgccaacccgtgtagtcggtgatctcgagtgcgggcctgtcaggggctctgtatgccttacgcttatgggtatcagtggaggccatgcacctcgctccacgtcttggctgcggcggcgaatcgattgcctcgatccgcataggacttgaactggtccatggaggcgcaggccggagccataagcacaatgtcgccggcggcggcatacgtg

SEQ ID NO: 3090 - DNA, 8081 bp, Unknown
  R215_18m  MAG No. k141_191
atcgacgggtacttcgactacaccgtgcctccgctggagggcttatggagcatgggggagggtgtgcccggcgtcgattacgcgcacaaagccgacttccattggacttcgatgattcgtctgccggaattcgtgaccgatgaggtctttgcgtgggccaaggcatcgtttgcctccaagcatcccgaagtcgacatcaatcgtgcatatctcttcgacttcgatgaaggcgtggtcgcgcaggtcatgcacaaaggcccgtacgacgacgagcccgcaaccgtgacgattctggacggctacgcgcgttcgcaaggctacgggctcgacttctccgacacccgccgccatcacgagatctacctatccgacccgcgccgagccaaaccggaaaatctcaaaaccatcatccgtcatccggtagtgaaggtgggttgactttcggcgaactgctcgaagcgctcaccgcgcagtagcgtgaacaatctgccggaatcctcaccgtggtcaaagagcgctaccaagaactcgataagcaaaataactagaagcactggttcctctcggagagattctgcccgagcgaccttataaatccttgcgcgggtcacctttcccggtgcaggaagcatccaggctcatgtgcattgatgacgccgatggattgcagataggcgtagacgatggtggtgccgatgaatcgcatgccgtacgtcttgagatccactgcgatggcgtcggacagaggggatgtagtcatgcctgtctcgtagatgacgtgacggccggtgaaccgccaaatatagtcgtcgaaactgccgtacgacgtctggatatcccggaatgcgttggcattgccgaccgtcgcgacgattttgcgacggttgcggatgatgcccggatcgttcatgagttcggcgatcttgttctcgtcatagcgccggatccgttcgatgtcgaacccatcgaacgcctgacggaaacgcttgcgtttgttcagtatcgtctcccatgacagtccggcttggaaggtctcgagcaccagcatctcaaagaggtggtggtcatcatgcgacggaaccgcccattcggcatcgtgataggcaacatagacgggattgctgagattgcaccagccgcagcgtgggttcatgtcatccatgtgttctccctatggattgtcggagacggttggttttagccgttagtgtgatgtgcgattcagtataatcggatttttactccagccgtggataccgtgaactgaaatcgatgtctgtgttcgcgtcgccatgctgatttgaccctcacatgatgtcatactttagcctgtaaccatgaatgaccggcaatcacacgacatggacactccggcggagcgtatttcccatctcaacgtaggggatgtgtcgcggctgacgaacatcagtattcgcatgctgcggcattgggacgaaatgggtctggtgtctccgcaacgcgactggaatggataccggctgtattccgattcggatctcagacgactgcgcaggctgctgctgtacagggagctcggcatacccgtgccgcgtatcaagcagctgctcgatgccaagccgagtgaggtaatacgcgagttggcggatcgtcggggccaacttgcacgcaaggcggaacatatcaatcaggcattggccgatatcgatcggcttatgaacgttgcacagaaaggaatcgatatgaatgatgcgacgcagcaatcccgagaatgggccgaagaagcgcagagccgttggggcgggagccggcagtggatgcaggttgcggaataccaggtgaggagaacgtctgatatgcaggagcgcgacatgaagcaattcgaagccatcgagcagcggctcgccgatgccatgcgtcacggcgtgaagcccggcagcgatgagggcaatgagctggcggaagcccaccgtcgttccttggtatggttcgatgtcaccccgtcaatgcacgtgtgcctcggccgcatgtacgtggccgacgagcgtttcgtacagcattacgatgctttggaaccgggtttggcccagtggctgcttgcactgattgaagccaacgcgacaagattcggtgtggatctcgacaatttgacgtggcagtgagatgtgatcgggaggtatcggaattatcgtgacatgaatgtcgttccggtcagttggctcacgaattggctcacagcgtgtgagggattgcgacgatccatcgatcataccgaaaccattggaatcacaaggattacaggcaccaagctgcgttaacagaaaatgttaacggattcagccaatccgttaacactggaattgtgttagcaaacgcccccagagcaaaaaagaagaagccctacatcccaagtgggagtagggctttcattgtcgggctgacaggatttgaacctgcgacgtcttgctcccaaagcaagcgcgctaccaaactgcgccacagcccgttttcatgccttaaggcataactttttaattatacgcaccgagtgggacactctgtaccttcaggcacccaagggatcaagccctgaaacatccgcaaactcggaggtctgcggtcattgttaaccattgttaacggatgccatttttcagtttttaccgaagtcccaaaacctaagcggcagtaggcctcagcgagggtcatagttttgctggtttggtatcatcctgctcccaaagcaggcgcgctaccaaactgcgctatagcccgatgtgccattaaggcacgaggaatcattataaacgacgctggatacattgcgtgtcgagcatatgaattcataaaggttctggattctcttgatagcttatgagtgacatctttattcattgatgctctacaacgactaggtttggatctgcatcgatatccggcgcatccgctggactaacaaggaccgtgcaaacgatgtggcccccgacttcctcgcaggaagtcgggggccacatcgtttgcacggtggactatcggatcaattctgatcagatcagctcgaggtcgacatcgaggctgatcggcttgtccgccgggatatggtactgggggtgcaccggcgacatccaggaatcatcgccgccaacgcccatctgtgcggcaaggacgcgcaggaacatgtgcttcggcttcggcagctcgtcctggtgctgagcctcctcaagcatgaagctggagtacggcaacaggcttaccgcgaacggcgcggcaccatcggcgcggctgacgcgcatgccgtggccgtgatcgtcggtaatctcggcccaacgcacatcctcatggttgcccgtctcctgcggcatgaggtacggcgcatgatcggcgaaggcgttggtgctccacacgccgagcttggcgtgcttgcggtccaggtacgtctcctccgggccggtgccgaagaacctcaggttcgtgtactgcacaggcagcgtccattcgatgccgaacgccgggatggtgggcaggtcaccctgctctccagggtattcgacgtgcaggttcacgcggccatcggtgtgggccgtgtaggagacggtcaccttggtgcgctgcgcggtggcgagctcatacgtgtacgtgcccttgagcgtgctgtcgtcgatctgctcgagcacgttgtccacgcagcgggcgtagcggccggcgcccagccactggacgcgctcgaagccatgaccggcaccgcgatcgttgtcggtcagcggacggaaggtggtgattgcgggacggcgcagcacgaactcgttgccggcgaaggtgtaggagaccatgccgccctgggtgcgcgaaagcaggacctcgcgtccggcgcctcgcacgccggcgttccaacggcccacggtgatggtcccatcggccggcttcgtgtcgggcgtcgcgatcgcgtccgcgggcaccacggcctgtccgaaggcgagctcgtagccgctctcggcccaatcggtcgccttggcgagacgctgcgaaacctgcagcaccagttcgcgggcgtcggcgcggtacgccgccaccggccatgcgacatcgaacgtgcgggcctcaccggcgggcacgtcgaaatgccgggtggactgccagaccggcttgccgtcggcgagaacgctcaggacgaacacgtagtcgccggtggcggtgaacaggttgtcgttcttgacggacaccgagtccttcgtcacgtcgatgtggacgttcgagtacagctgcttgacttcctgggccttgggggacggcttgcggtcggcgaacagcaggccgtcgccggagaactcgtagtcggacggacggtcgccgaagtctccgccgtagcgcaggctcctggtgccgtcgggctgggtggcgtagatggcctggtcgatgaagtcccagatgaagccgccctgatacttcgggtagcgttcgagcgccgtgtattcgtccatgttgcccacggagttgcccatggcgtgcatgtattcgcaggagaggtacggcttcttcgggtcgtccttcaggtacttctcgatctcgtcggcatgcgagtacatacgggtctcgatgtcggtgacgtcatcgtagtcacggttgtgggtcacgccctcgtagtgcaccggacggttcgggtcgatgtcgtgcacgtgcttgtacatggcgcggaacacgtcgcccacgtaggattcgttgcccagcgaccagatcagcacgctcgggtggttgtagtcacggcgcatcatgctgttgacgcggtcgacgcaggcgccttcccattcgcgcttgctgcccggcacgatggtgtcctcggtgaggacgtctccgggcagggaccagctgccgtgggcttcgaggttggcttcgtcgatcaggtagatgccgtactcgtcgcacagttcgtaccagcgttcctggttcgggtagtgcgaggtgcggatggagttgatgttgtggcgcttgcagaagaccacgtcatcgatcatgtcctgctcggtgatggcgcggccgcgttcggcgtcgaactcgtggcggtcggcgcccttgaacacgatgcgcttgccgttgatggtcaggatgccgtcctcgatgcggaagcggcggaaaccgaccttctgggacgtgcattcgatgacgtcgcccgcctggtcgatgacgtcgacgtcaagctcgtacagcgtcgggctttcggcgctccagggttcgatgccctgcagcggcccgctggagatcgcggtctgcgcctccgcgtcgcccgtcgtctgccacaccgtgttgccgtcggcgtccttcagggtcgcgcggaccgtggccgcgtcggccgcgttgagcacggtcagcgcggcatcgatggaggcggtgccggcctcgggatcccaatcggcttcgatctgcgtgttctcgatgtgcacgtgcgggcgggcggcgagttcgacggagcggaacaggccgtgcagacgccagaagtcctgatcctcaagccaggaggcgctggagtattcgtagcaggcgacggccacgacgttctccccgtcgtgcagcagttcggtgatgtcgaactcattgggcgtgaagccgtcctcgccatagccgacgaacgcgccgttgacccacacgtagatcgccgtggccatgccgtggaacacgatcgacaccgatccgccggcctgcttggcgtttgccacgggggcggagacggtgaacttcctgcggtagagcgcgacgtgattgttctccgggatgttcggttccaacgggttctcgtggccgtcccacggatactggacgttcacgtacttgtggttcatcagaccggccgtctgcaggtggcccggaacctggatacgctcgaacgaggagtcgtcgaacgactcggccgtcgcgggttcctcttcgaggttgatgtcggcggcctgaacgacctcgacccgccactcgccgtcaaggctctgcttgagatcggaccattgtccgctctgggggtcgcgggcgtaccacttgtggctggaatgggccggagtccggttcacctcgaacaccgtcgggtcggtcagccaagcctgcgatgcgcgatcgacatgtgtgacgtctgtcatgctctcctgctttctgtcattacctcgttgtgaatgatattatggaggaggtcggggcctcctttaccgaaaagaataaacagtttttatataaaacgcaaatcctgtttaccgcttccaaatcactggcactgcttgccgtcgacgctacgccgcgtccatgcaatgtctcgattcagcccatgttatcccatccttgcgacacgctgtttatctccttgtttactaatgctttttacttttggtgataaaacttgtatgcttactttacaaaatcaatgagtgattccatgctctgggttcttaaggagaagattaatgagcaacgaaaatgccgcggacggtgacgtccgcaggaagagtgggttaggccagcgcatcgcctacgcgttcggcaacctcggtcaggccgccttctacaacgcgatgagcacgtacttcatcgtgtatgtcaccagctgcctgttctcgggcgttgacaaggcgcttgcggccaagctgatcggcgtcatcaccagcctcgtggtgatcatccgcatcgccgagatcttcgtcgatccgctgctgggcaacctcgtggataacaccaccaccaagtggggccgtttccgcccgtggcagttcttcggcggactggtctcctccgtgctgcttgccgtggttttcagcggcatgtttggcctggtgaacgttaactccacattgttcatcgtgctgttcgtcatcacgttcatcgtgcttgacgtgttctactccctgcgtgacatctcctactggggcatgatcccggcattgtcctccgactcccacgaacgttccacctacaccgccctcggctccttcaccggctccatcggcggcaacgccatcaccatcctcgtgattccggtcgtcacctatttcagctgggtgttcaccggcgagaacgccgagcaccagtcgggttggaccgctttcggcatcatcgtcgcggtgctcggcatcatgaccgcctggaccgtcgccttcggcaccagggaaaaccaaagcgcccttcgcgccaacgccgaagacaacggtggtccgttgcaggcgttcaaggccgtgttccagaacgaccagctgctgtgggtcgccctgtcctacctgctgtacgccatcgcgaacgtgaccaccaccggtgtgcttctcttcctgttcaagttcgtccttgacaatcaggccgctttctccgcgaccggtgtcatcgccatgatcgcgggcctggtcatgtccccgctgtacccgattctgaacaggtacattccgcgccgctacctgtacatcggcggcatggtctccatgatcgtggcttatgtgatgctcgccctgttctccagcaacatcgtcctggtcttcatcgcgctggtgctcttctacgttcccggcacgctcatcatgatgacggtcatcctctccctgaccgactccatcgagtacggccagctgaagaacggcaagcgcaacgaggccgttacgctttccatccgcccgatgcttgataagatcggcggcgctctgtcgaacggcatcgtcggcttcatcgcccttgcggccggcatgacgggtgacgcaaccgccgccgatatgaccccgacgaatatccacgtcttcaagatctgcgcgttctatgccccgctcatcctgatcgtgctcagcctgctggtgttcgtctccaaggtcaagatcaccgagaagatgcacgcgcagatcgttgacgagcttgaagccaagctcgcttccggcgagatcgtcgacgatgaggcgcagaccgtggaggccgccgaagccgccgcagccgtcggcgatgagacgcagacagtcaagaactgatctcccgttcccatccctcccataaggcccgtccgcctgaaccgcaagatgcggtccgtggcggacgggcctgttcgttcctgcggtcggcggtcatgaacatacccatgtcggttccggcagtggggccgg

SEQ ID NO: 3091 - DNA, 39941 bp, Unknown
  R215_18m  MAG No. k141_279
ctacgatccctaccgcggcatcgtcacctacatccgtatggaggacggcgaactgcacgaccgcgaaaaggtccacatgatgggcattggcatgacccacgatcccatcgagatcggtgtgatcagccccgatatgacccgtaccaaggcacttggcgccggcgaagtcggctacatcattactggcgcaaaggatgtgagtcagtccaaggtgggcgacaccctgacctcggccgtccgcccggccaccgagccgctgcccggctaccgcgaccccaagccgatggtctacgccggtttgttcccgatcgacaacgcgcagttccccgaactgcgcgacgcgctcgacaagctcaagctcaacgacgccgccctgatctacacgccggaaacctccgtggctctgggtttcggcttccgctgtggcttcctgggtctgctgcacatggaaatcgtcaacgagcgactctcccgcgagttcggcctcgaccttatccagaccgctccgaacgtcacctacgacgtgaccgccgaggatggcagtcagcatcatgtgaccaacccgagcgaattcccggacggcaagatcaagaagatcgtcgagccgatggttgccgccgacatcatcacacccaaggaatttatcggtgcggtgatggatctgtgccaggaccaccgcggcattatgggcacgatggagtacatctccaccgatcgtgtcgagatgcactaccgcattccactggccgaaatcgtgttcgacttcttcgaccagctcaagtcccgcaccaagggctacgcttccctcgattaccatgaggatggcgagcagtccgccgatttggtcaaggtggacatccttattcagggcgagaaggtcgatgcgttcagcgccatcgttcaccgcgataaggcgtattcgtacggtgtgatgatgaccaagaaattgcgtagtctgattcctcgccaacagtttgagattccgattcaggccgcaatcggttcgcgtatcatcgcgcgtgagaacattcgtgcgttgcgcaaggacgtgctcgccaagtgctatggcggcgacatcacccgtaagcgtaagctgctcgaaaagcagaaggccggcaagaagcgtatgaagatgctcggccatgtggaggtaccgcaggaggcgttcatcgccgccctgtccaccggcgaggactccaacgaccgcgacaccaaagacaagatccgcgccgctcagaagaccgagggctagtgttcgaggtctacatccacgtcccgttctgcttgcggcgctgcggttactgcgacttcaacacctacacggctacggatcttggtgcgggggcctcgcgcggcaactatgccaatatggtcattcgtgaaatggccctgaccaagcagtggcagctcgaccacggcatcgaggagccaccggtctccaccgtgttcttcgggggtggtacacccacgattctcgccgcccgcgatctggtcgccatgctcgatgccatccgcaggatctggagcatcgcgcccgacgccgaaatcaccaccgaagccaacccggacacggtcaacgaatattacatcaatgagctcgctgccggcggcttcacccgcgtttccttcggcatgcaatctgccgtgccgcacgtgctcaaaaccctcgaccgcacgcatacgccggccaacgtggccgcaggcgttaatgccgccaataaggccggcctgcgctccagcgtggatctgatttacggcgcaccgggggagagccttgacgattggcgcacctcggtcacgaccgccatcgacctcggcgtgaaccacatctccgcctacgcactgaccgtggaacccaccacgaaaatgggtcgtcaaatcgcggccggcactctgcccaaacccaatgacgatgacgaagcagccaaatacgaaatcgccgacgacctgttcgccgccgccggcctcgaatggtatgaggtctccaactgggcccgccccggatacgagagccagcacaacctcggctattggcgcaacgtcgattgggccggtctagggccaggtgcccactcccactacaacgcggtgaccgaggctgaccacccccagtcggcttcgctgacagcccccgccagcgggggcaagtccgaagccattgcctctgcctcagctgatggacaggccaacgccgaacttggagaaaccaacgccgaactaggtatgatcaacgcgcatgggaacaactcccaagaaattcatgcccccgctggcgggggctgtccggcggatgccggactgggggtggtttctgtctcacacggtctgcgcagctgggacatcgcgcacccgcgtttgtggggcacggccatcaacgagaaccgtgtgccgtgggccgatagcgagacgatcactcccgaggaaaacctcgaagagctcatcatgctcgggctgcgcctgcacgagggccttggcctcgaccgcatcaatcgcgccatcaacgatgcaggtatgagcagcacgccccagactctccgaaccgtttcggttgaccaactcgcccccatgatcagcgaaggcctgattaccgtatccgataatcatcgagtggtgcccactcgtcgtggccggttgctcaatgactcggtaatcgaacagttctttgattacgtcggtgtatgagtcggtggtatggtgcgcggcagtcgccattacctgttcgctagttgtggttacaccgtcagagggagcttttttgttttaccggcgggggagggaaccgcgtaggactacgtccggggcgctttgcacgtagatcaggcggttggcagtgccgccggtggcctccgcgtcatcgcggttggacaggatgctgtccacggcggcctggcccatttcggccagcggcagatgcacggtggtcagtggtgggaacacgtcggcggagtaggggatgtcgccgaaaccggtgacgccgatttcctgacccggctcgatgccgttggtgcgcaacgcggtcatcgcaccgatggccatcacgtcgttgagcgcgatgattgaatcgatgcctttgccgtcgtacagtgcgccttcgcccggcttcagcagtccggatcgggccatttgcatgacggccgcatagccgtcggtgcggctgaacttaccgtttgccacggctttcgggtccacggtgatgcctgcctcgtccaacacttccatcacaccggccagtcgttctttggaggagcggtgtgcgtcatcgcccttgagaatcgcagggcgcgtatacccggaatcgacgataagctttgcgatggcacgcgcgccgacgtcgttcgccacgtccacggccgggaagggcaggttgcggttgagtacgaacacggcatgtccgccggacgattcgtactggatgagttccgtctgcaacgcctggcgttccggcgcgtcggtgtattcgctttcggagatgatgatgccgcgcggcctggtggatacggacttacgcaccgcctccaactcctcgtgcggggtggctgccacgccgatggtcacggagatgccgcgttcggccgccgccttgaccacgccttgcgacacggatgcgaagtagggatcggagatatcggagaccagcagcacgatgttcggtgcagtgcctttggccactgcctgagcataggcgttgggacgatagttgagcttggtggctgcttccatcaccttgacatacgattggttgcgtaccttgcgggtgctgccgttgagcacacgggatgcggtggcgatggagacctgggcttctttggcgacgtccatcaatgtcgctggcgattgcgccttatcgttctgtacagtcacgatcgaatcggtccttttcttccctgaaacggaaaacatgtctaaacgcttaccgcaatgatatcgcagttttgcttgcaatagtagcattgtggattggaaagcctgaattttgaacaaaaataatcacgcgaattatggaaagcgcttaccgttccgcgtgtcgtgcggtatgctcgaagcatgacgcgatacttatgtgcccctgactccttcaaagagagcctgaccgccatggaggcggcccgggcgatggctcaggggattgagaatgccgaccacgatgccgaggtccgttgcctccccatggccgacggcggtgaaggcaccgcacgtgcgcttgtcgacgccactggcggatcgatgcacgccgtgccggtccacgacccgctcggccgacctgtcgaaggccacttcggcctgctcgccgacggcacgaccgccgtggtcgagacagccgaagccagcggcctcgcactgcttgaagccaaaaaacgcaacccgttgattgcctcctcctacggcaccggcgaactcatactcgccgccgttcgttccggagccaagcgcatcatcgtcgggctcggcggcagcgccaccaacgacgccggtgccggacttctgcaggccctcggcgttcgtcttctggacgggaacggcaacgaccttaagcacgggggagcggccctcgctgatctggccaccatcgacatcagcacgatggacccggctctcaagaacgtctccatcaccgccgcctgcgacgtgaccaacccgctgaccggtcccaccggcgccagcgccgtgttcggaccgcagaaaggtgcctcccaggccgacgtcgccacactggacgccgcgttggcgcacttcgcgcaggtcatcgaaagccggctcggcgtcgctgtgaacgacgtgccgggcgcgggcgccgccggcggtatcggcgccgcgctgaaaggcttccttgacgccgaattccgtccgggcatcgccatcgtcatcgaacaatccggacttgatgcggccgcgcaatgggctgacgtggtgttcaccggcgaaggctccatcgacttccagaccaagttcggcaaaaccccggccggcgtggccgaaaccgccaagcgccacggcaagcccgtgatcgccgtcgccggacacatcggcacgggcatcgacgaactgcatgaggtcggcatcgacgcggtattcggcatcgcccccggtgccgccagcctcagcgaactgctggccgacgcggccgccaacgtgacccgcaccaccgaacaagtcgtacgaaccctacaactgaagcagcttcacaagctccctctgatgggccgagccgtgaaggaaacgccggaggcgtttccaggcgagggcttgacgacagtcaacccagccgaaggctccataattgcgggacgagctgccgcggcaaagccgtgactgaggggggagacttgtggcgcagccgcaaaaaatggcatcggctttcagccgatacagtcattcgtctgcttctctccctcagtcagctgcgctgacagctccctcgtcagagggagccacacaattcggaaaggaagatatgcgcaccatgctgtacaccaaggtgaccagcatgctgagcaccacgggcatcgccagcgagaaatacgccttcggaatcggcgccttttcgaagagttcgttatccatttccgtcccttggtgttttcgttcttcagtcactgcgcgggatgccgttcggcgtgcatcacaggcattgcagaggcaacagtgtggacaacgggcggggggagtatctcatgatgcggtgagggcgttgatgatgacgcatcgtgtattggtggccgtgtgcatcgtatgtgaacctgtgctggcacggcgtacacacgatgggaaaagaaagaatatatggaccccgttgtcccggttattgttcagttattactgtgttgaattattgcgttattcaattattgtggtgtgccggccgattgcggcctgcgggggattgccttcgtatgtgtcgtgcaatctcatgaatgggatcgttcgctagattcagcgagcgtccttgttggcggcgttgatgatgtcggcgaacatcttggagtcggcgtagccggcgcgggcgatggcgtccataccggagagggtgaaaccgcgaatcatggaatccatgaatgacataatgtgttccttgtcttgacttgcaaagccgtgggctttgcgatgtgttgttgtttacgttatgagacgggccgtgtgtgagcggcgagtcagggaagaggctcagcgagcgttcttatcggtgtcgttgatgatgtcgagaatcatctgggagttggcgtgaccggactgggccagggaagtggcaccgtacatagccagaccgcgaatcatggaatccttgagagacatcatgtttcctttcgttggtcaaaaccttgtggctttgagttttgtttatcggtttctttctgaaaccggtttcagaataacgcagtccgatgacaaacgcaaggggactattccgctctcggcgtttctggcggaatatcgccgttctatagataccgttcggtagttaagaggctgtctagtcgactttctgacggtcttgttctgggcgcatggttttcacgaaatggcctcatgtcgcggaaatcgtacgctgagtcgtcgtaagcgtacggtcttcacgaaatggggtctcatctcgtgaagaacgtacactgagtcgttctgggcgtacggttttcacgaaatggggcctatcttcaccggattttgggcacaccggccttgagcagcttggtctcaagattgatggggcgtagcagatcctcatagaacacatggacgatttcggtgacgccctgttcccggagatgccgatcgcgtctgcggtcgtactccattttcgcctggaggcttgcgcgattctcgttgctggtgtcggcgtatttggccatgccgtcgtattctgccacgatgatgcggccgtctgcgagcttccaacagaaatcgacgcgatatggcattgcgggattgtcgggattcatgaactgcacctgcagcaggggaatgccgaaagacaattcggtgatctggccacgcatcaatgattcgccgccgttttcgctcaggggatccgcgtacttcagcagcttggtcacggagacctcgtcgcagatgctttgaatcatcagcgactgcacctcttcgatggtcgtcagggactttctcagagccgaatcgtatatgggcagcgcctgtgggaatgggaatgccgcgcagtcgagcagcgttcgcgccggagtcgtcaagagaatgccattatgcttccgcgtcggaatccgattgatatagatgcggttgagacgcgcctcgtctccgccgccgatgccggacttcgaggcgatgtgcactgtgccgtcgtgcagggaatagttgtgctgcagtccgtatacgcacgccgcactcaaccccgcaaatacccactgagggtggattgcggacagcgcacgtatgacctgcaatgactgttgctctctggtcatggtgttccaaagtattcggtcggcgtacaggttcttatacggtgacaccagctccccggcatgcaggcgacgtttcagggcgcgccgttgcgcatcactggtgccatagcagcagcgacgctcctgcttcgcctgctgcagcagtgcagaaacttccttgtgttctttcatatctcgacgctaagggtgattttgattgttgcacaagctcaaccggcaaatgtgaatactatgtcacgcgaattgttggtgtggataacttgaatcgacgtcgacggctttgccgacggtcttgtcggaggcgatattagcctaggacaccttgctgcgccgccttccataccgagaacagtcatcagtgacaccgagggcatcttcagcgtatgttcttcacgaaatcagctgccatttcgtgaaaaccgtacgctcagaatgactcagtgtacgttcttcacgagatgaggccccatttcgtgaaaaccgtacgttgacgacgattcagtgtacgttcttcacgaaattagggatgatttcgcggaaaccgtacactcaccgcaactcagcgtacggttttcgcgaagttattgatttggatataggttccccgtcatgaactacaatgaatcgcggcgaaaaacggggaaccgaagtcggagcgcggctgaacggatatgggtgtgactggatgactgccatggtgatgccggttctccttgacgtacgcaacaacaacaactgacaacaacaggggagacaaggatggcgagaagtgcgggccgcacccgaccggtgatcaaggacgtggccagactggccggagtctcggcaccgaccgtctcccggtatctcaacggcaccgtcaatgtcaccgaagacaagcgtgaacgcatcgccaaggccatcaaggagctgggctatgagccgagcattgtggcgcgcgccctgtcgaaccgggagatggactccgtggtggtgttcgcggccaatccttccgccttctccacgtccgaaacgaaccatggggtcgaggccgccgcccgtaaacgtcggttcctgctcaatatcgtttctttggatgagtccgacatggactccgtcaaggctcgtgtgcgcatgggtttgtcgatcaggccggcgggcgtgatcgtctacgagtacgaccgggccggcatcgccgcactggaatacattcccaaagatatgccgatggtcgtggtgggtggcagcttcggcgacggcgaataccagatcatcaacgccgaaagggatggtggccgttggatgaccatgcatctgctggatctcggccatcgcaccgtgttccatgtggggcgcccggaaggaccgaccgataacacccgcaccaatgggtggcgtgacgcgctcaaggagcgcggcgtcacggtacctgacccaatcatcgtgcccgacgatgatttggaggagtcggtcaaggctgggcgcaccttgggccgtcgtggtgatgtgactgcgattttcgccggcaacgacgagaccgccatcgctgtgatccgaggtctaagggaggttggtcgccgcgtgcctgctgacgtgagcgtcgtaggctttgacgaccgcaacttcggtgccatgtggaatccggcgctgaccagttacacccagaacttcctggacatgggggagcggtccttccggatgctgttcgaacagattcaggccaagcgtgccggcgatgacgcgccgccctcgcaggtcgaagtggtgcaaggcaagccgtgtctgcgtgcctccgaacgcgcgtacggcgacggcgaaatcgcgtagtcgatggggcgtgcgtatcaatcgatagtgactgtagcgcattcatatcgtgacgaggagtctcccatgccgaactgtaagcgcttaccttaaatagttcataatgtgatttacgtcatactaatagatgttctgaatcatagtgttatgcaaggattccttgcggaaaatgcctatttatcaacagttttcgaaaagtccgcatgatgggcgactgtgagcacgctttatggtaatcgctttccgtagtgttattgttacagtgtgacttttgaacaatcggtaactctgaagactcagccccagacctcgggcactatctcagcggcagacgccgcgatgcaatcggcccgcgacgaacgcatccccggcaaactcatctgcgcgatcgtggccgtcggctcactcgcattcttcggcatcctgaccgaaaccgtgatgaatgtgctgttcccgcagctgatgggcgtgctccacatcagcgaggccaccatccaatggctcaccaccggctatccgctggtcgtgtcgattactgtgccgctcagcgcatggctgcgccgtcgcttccgccagcgcagcatcttcctggcggcaacgcgatgttctccacgctgcagcagttcacgggtgcggccggcaccactgtggtgggctaccgtgatctccgtgttccagtccggctcgggcaaggtgggttccgccggctatgccgccgccaccgtgaccggcgcatagattgactacgcgatcatggctgtggtcatcgttatcgtgttcgtcgccatgctccacgccctgcgtaaccggaagtagatggtaagtcgagtggcaccatgctaccgcgcaatggctgggcatggagttttggctaggaatcgttcgacaggcgttggcgcggccgctgagagcattcgcgtcgaaaggtttgccggagctcgttcggcgtggaatgggccgattcaccggtgattgttggtcaaacagccaatgctgacccttctgccaatggttagcgaggttcctatcataagcatttcggagagcgatctcgaaaaaggcgacatccttcacgaggatttgaccaaggtcaacattccactcgtataaagtaaggctgtaagcgcatcttggtggcaagcgtcaaggtatgtacggaatcgcggggcggaaagccactcctcaatccactgcggattggtgataacggatgattgtaacgcatgaatcacgaggcccccttacctcgtattgcaatgccccggtgacatgaaaaacggcggtcaacacggggcttgtacattaaggatacaggaagggtagttataagttgctgatatgccgtgttttttacgatagtcatcggcctctcccatacgacggaacaggaactgacggatgccgagatgccgtgattcggcgggaggacctgtactggcccagtccttctgctcggtagcggtaccgctacgccgactcttcccgacgctccagtgccgccgatatcagtgaatgcccagcctgatgtcggtagagttaaggctattggcttggtctcgacggtgagacttctccaatggccaatatgcactgttgcaaaggagtatgcggtatgcaaccaatcaaagccattcaatacggctgcggcaaaatggcgaagtacacgattcgctatatgcacgagaaaggcattcaaatcgtcggtgccatcgacgtgaatccggaagtcgtgggcatggatgccggtgtgtttgcaggcatcggccccatcaatgtgccgattcgcgccgatgccgaggctgtactcaacgagtgcgacgcggatatcgcggtagtcacgctattcagcttcgagaacgaaatcgccaccatgtgcgagcagtgcttggcccgcggcatcagcgtgatcaccacctgcgaggaatgcatctacccgtggaccaccgatccggccaccacgaaccgtctcaacatcatcgccaaggaagccggtgccaccatggtcggctccggcatgcaggacatctactgggtgaacatggtctccaccgtcgccgccggatgccacagcatcaagaagatcaccggtgcggtgagctacaacgtcgaggattacggcctggctttggccaaagcgcacggctgcggtctgaccgccgaggagttcgaggccgagcttgcgcatcccgaaaccgtggtgccctcgtatgtatggaattccaatgaagcgctggcccagaagcttgggcttaccatcgcatcgcagacccaggccagtgtgccgtatttcagcgatgtcgacgtgtattccgagacgatggacgagacgattccggtcggcaaatgcatcggcatgtccgccgtggtaaccaccgaaacgaatcagggcatcacgttggaaactgcctgtatcggcaaggtgtacgggccggatgatggcgatatgtgcgattggaagatcgagggtgaaccggacgtggagttccacgtggtcaagccggcgaccgtcgaacatacgtgcgccacaatcgtcaaccgcattccggacgtgctcaacgcgccagccggatatgtgacggtcgatcagctcgatgaaatttcatatctcacgtatcccgccgcgctgtacgtggcatagacccatattttcagggatgaaggccggcactcataagggtgccggccggtatcaggcggccagagtcgacgtgcgtggcatcacctggaactggatatggtcatgggtgatgtcatcgggccgttcatgccgtaggttcgactcgatcagcgtcaccatgcgatcgataaccgtacgagccattgcggggacgtctatcgccacagtgctaatgggtgggttggcgcagtcggagaaggggatgccgtcgaatcccatgagccgtacgtcgtcgggcacgcggatgccatgttcggtgagttcgcggagcgcgccgatcgctatggtgtcagacatgcacaggatgccacaatcgcccgggacaggcgtcaggaccgcaagcagcatcctgctcggcatcggcggcgacatcgccaacttcaaaagcgcggcccacctggccgcccacgccggcatcgctccggtcaccggccagtccggcaccagcatcaagaggcgagaaaccctccagacggggcaacaaacgcttatagactattgcgccttgtataaatgcgaactgccagtcaaccttaccgttgactggcagttcgcatttatcgctcccgctggcgggagctgtcatgcgaagcatgactgagggtggtccacagccgccaatccgtaacatcacccaacgcagcatttcacgatacggacgtttccgtatcgtattttcgtgtggtcaaatagacatttcgggcgaaaaagttcgaaatacccccataactggccataaaaacaattgcttgagaatcactattgacttttatggcgactcggtatatggacacgcgaaacgaaaatgacatggagcaacggtactgtgtcaacagcaatgaacgaagaggcacgattcccttacgtgcccacaagcaattgaggtgattccggtgacattcaaagccccgctcgatctcacggtccacgctccggacggtatgtatgatcccgccaacgagcatgacgcctgtggtgtgggtatggtcaccactttgaacaagcgtcctgaacgcaaaatcgtcactgacgccattgaggtactggtcaatctcgaccaccgcggtgccgtgggtgccgaggagaacacaggtgacggcgccggcattctgatgagcatgccggatgagttcatgcgtgccaccgtgcccgccgaactgcccgaagccggccactacgccgcaggcatcgccttcctcgaccgcgacatcgaaacctccggtcagcaggaacaggccattgccaagatcgtgcgcgaggagggccttgaagttctcgcatggcgcgtggtgcccaccaacccggacggccttggcctgcaggcccttgccgccatgccgggattcaagactctcgtggtcgcctctccggacggtgctctggccggcgtggacttggatcgcaagaccttccgcatccgcaagcgcgtcgagcatgaggtaggcgtctacttcgcttccctgtccgcccgtaccatcacgtacaagggcatgctcaccaccatgcagctcacccacttcttcgaggatctgaacgacgagcgcatgaaggccaccatcgccatcgtccactcccgcttctccaccaacaccttcccgagctggccgctggcccagccgttccgtctgctggcccacaatggcgagatcaacaccattcagggcaaccgcaactggctctccgcccgtgaaggtcgtctgagcagcgaactgctcggcgagttcgagccgctgctgcccatcaccactccgggctactccgattctggcaccttcgacgagtgcctcgaactactgcacctcgccggccgttccctgccgcacgccatctgcatgatgctgccgccggcttgggagaagaacccggatctcgatccggacgtgcgcgccttctacgagtacagcaacacgcttatcgagccgtgggatggcccggccgacatcgtcttcaccgacggcacccaggtcggcgccctgctcgaccgcaacggcttccgccccggccgctggcagctcaccgacgacggctacatcgtgctggcctccgaggccggcgtactgccggagatcgcgcaggagcacatcgtgtccaagggccgtcttgagcccggcaagatgttcctggtcgacaccgccgaaggccgcatcatccccgatgaagagatcaagaagaccctcgcctcccagcacccgtaccgcaagtgggtggaaggcaactcggtcgagatgagcgatctgccccgccgcgagcacgtgagccactccggacagtccgtccagcgccgtcagcgtgccttcggctacaccgaagaggatctgaagctgttgctcactccgatggccaacaccggtaaggaaccgctgggatccatgggtaacgatgcgcctatgcccgcactctccagccgcagccgcatgctgttcgactacttcacccagaagttcgcgcaggtcaccaacccgccgctggactgggagcgtgaggagatcgtcacctcgctcgaatccgccatcggccccgagcctaacctactggccgattccgagctgcacgccaagaagatcctcatcccgctgcccgtggtcaactctgatgagatggcccagctcaagcgccttgacaaggcccgcatcctcggcggctactatcgcccgtacgtggtcaagggcctctaccaggtcgccggcggcggcaaggccctcgaagagcgacttgacgagatctttgccgaaatcgacgaggccatcgccgacggcaagaacttcatcgtgctctccgaccgtgaatccaaccacacgtggggcccgattccgtccctgctgctgacctccgccgtgcagcaccacctgctgcgccgccacacccgtacgcagatctccatggccgtcgaggccggcgacgtgcgcgagattcaccacgtcgcactgctgatcgcttatggtgccgcctgcgtgaacccgtacctggccttcgaatccgttgaggatttggcccgtaacggctacctcaaggtcgacgcggacaccgccgtgaagaacctcaccaaggcgctttccaccggtgtgctcaagatcatgtccaagatgggcgtctccaccatcatgagctaccgtggcgcacagctgttcgaggctgtgggcctgagccaggaagtcatcgacgaatacttcaccggcaccacctcccgtgtgggtggcgtgggccttgacgagatcgccgaagaagtggccatccgtcaccgcgtggcctacccgaaccagtggagcgcatccccgcaccgcaacctgcgcacgggcggcgactacaagtggcgtcgtaccggcgaggaccacctcaacgatcccgaggccatcttcctgctccagcagtcgacccaccgtggcgactaccagatgttcaagaagtattcgcaccacatcaacgacacgtcgaaccgactcatgaccctgcgtggcctgatgaagttcaacaacaaccgcaagccaatcgacatctccgaagtcgagccggcctccgagatcgtcaagcgcttctccaccggtgccatgagctacggttccatctcacaggaagcgcacgagacgcttgccatcgccatgaattcgattggcgcacgctccaactccggtgagggcggcgaatccgacgatcgtatcaacgacccgcagcgctacagccgcatcaagcagatcgcgtccgctcgcttcggcgtgacctccgattacctcgtgcacgccaccgatttgcagatcaagctcgcccagggcgccaagcccggtgagggtggccacctgcccggtgccaaggtcccgccgtggatcgccaaggtccgtcacgccaccccgggcgtggagcttatctccccgccgcctcaccacgacatctactccatcgaggatctgaagcagctgatcaacgatgcgaagatggccaacccgaaggcacgtatccacgtcaagctcgtttccgagttcggcgtcggcaccatcgcggccggtgtggccaagtgccatgccgacgtggtgcttatctccggctatgacggcggtacgggtgcagccccgctcaacgccatcaagcacgccggcaccccgtgggagatcggcctgtccgaaacccagcagacgctgatcctgaacggcctgcgctcccgcatcgtcgtacagtgcgacggcgagctcaagaccggtcgtgacgtggtcatcgccgccctgcttggtgccgaggaattcggcttcgctactgcggccctgatcgtggaaggctgcgtcatgatgcgcgcctgccagaagaacacctgcccgcagggcattgccacccaggatcctgagctgcgcgcccgctttaagggcaagcccgagtacgtggtcaacttcttcatgttcatcgctgaggaggtgcgcgagatcctcgcccagctcggcttcaggactcttgaggaggccatcggccacgttgagtgtttggatcaggacgaggccatcaagcgctggaagtccggcggcatcgacctgaccaacgtgctcaagcaggccggcccggtacccggcacgatcctgcaccagaccatcgagcagaaccacgagctggagaaggcactggacaacaagctcatcgaacttgcccagccggccctcgaacacaaggaacccgtgcgcatcgaaatgccgattcgcaacgtcaaccgtacggtcggcaccatggtcggctacgagatcacccgccgttacggcgaggaaggtctgccggacgacaccatcgacatgaccctgcacggttccggaggccagtccatcggtgcgttcatcccgcgcggcgagaccatgcgcatctacggtgaagtcaacgactacgccggcaagggcctgtccggcggtcgcatgatcgtgcgcccggaagacaccgtcaccttcgacaagcacagcaacgtcatcgccggcaatgtcaccggtttcggcgccacttccggccagatgttcgtagccggtcgcgccggcgaacgtttcggcgttcgtaacggcggtgccacgttcgtggtcgaaggcgtgggcgaccacggctgcgagtacatgaccggcggcactgttgtggtgctcggccccaccggacgcaacttcggtgcaggcttctccggcggtaacacttatgtgcttgacctcgatatgaagaaggtcaacccgggtgccatcaagtccggtgcactgcttttcaagtcgcttgatgccgaaacctccaagctggtgtacgcactggtcaagcagcatgccgaagagaccggttcccagttcgccgcggccctgctggaggactggaacgaaaccgtcaagcggttcactcacgtggtgccgaagcagttcgtggccatgacgaaggccatggaagaagccaaggccaacaatgtagatttcaatgcgcccggcacctgggaaaaggtgtacgagcaggttatggaaggagcgcgctgacatgggcgacccgagaggattcctgaaggtccgtacccgccgagagttggctgaacgccccgttgaggagcgtatcaaggactggttcgacgttcacgccgaaaccggcctgcaaccgtggacccaaacgcaggcggcccgctgcatggattgtggcaccccgttctgcatgaccggatgcccgctgggtaacctgattcccgagtggaacgacttggtccgtcagggcaagtgggaagacgcctacaaccgtctgtccatgaccaacaacttccccgaagtcaccggccgcatctgcccggccctgtgcgagcaggcctgcgtgctcggcatccaccagccgccgaccatgatcaagcttgacgagcagaccatcatcgaccaggcatgggatttggactacgtcaagccgctgccgccgcagcgtctgaccgaccagacggtcgccgtcgtcggctccggccctgccggcctcgccgccgcacagcagctcacccgcgccggccacaccgtcgtcgtctacgagaaggacgacgccatcggtggtctgatgcgttacggcatcccgaacttcaagcttgagaagggtctgcttgaccgccgtgtcaagcagatggaggccgaaggcacccgcttccgcaccaacgtggaaatcggcaaggacatcacgtgggatgacctgcgtgaccgttacgacgccgtcgtagtggccatcggctcccgcgtgccgcgcgatatgaagattccgggccgcgagctcgacggcatccacttcgccctcgacttcctgcccgacgccacgcgccgtatcttcggcgtcaagccggtgcacgacatcaccgccaaggacaagcacgtcatcgtcatcggcggtggcgacaccggttccgactgcctcggcacctcgatccgtcagggtgcgaaggacgtcaccgtgctacagatcatgccgaaagagccgtcaagccgtccggacaacagcccatggccgaccttcgcccgcacctaccagaagacctcctccatggaagagggcggcgagtacatctactccaccgactccgtgaacttcgagggcaccgaagaggagaaggccaaggtcgccatcgacaactcgaccaccgccgaaggcttcgtggccgatgagcgtggtcatgtcaccggcttgaaggtcgtctccgtggctcccggcgaaaatggtccgttcactcgccagcctggcactgagcgcgtgctgcccgccgatctggtcctcatctccgtgggcttcctgcacccggacaccgagaccatcctcgaccagctgcccgtcgaactcgacaagcgtggcaacatcgctcgcaatgacaagttcgccacctcccaggatggcgtgttcgtgtgcggcgatgccggccgtggccagagcctcgtggtctgggccatcgccgaaggccgctcctgcgccgcagccgtggacgagtacctctccaaggaaaagagcgagctgccggccccgatcaaggccagccagcgtccgatgatgctgcctcgctgaatactttccaaacagaaacatgaaaatcccttcttcatgaggggatttttgcgtttctgggattaattactgccttgagtcttcagtaatgtttatatttcgagaatattgcatatatagttaatatgaagctcctatggtgtctttcgtcgccaaaaagatgacgccagaatatttgggagagattcatgaacacacgtcatgtcacttcactggtcgcggccggtgcggcaatcgtcatgctgctcagcggctgcggatcgaccggtacctccaattccagcaatgcttcagattccaatatcatttccgtgtacggcagtgagccggcacacccactattccccggcaacaccactgaggccggtggcggcaaggttgtagaccagctgttcgcaggtctggtgacctacgatgcgaagggcggcatccacaacgaggtagcagacagcatcacctccagcgacaacgccacgcattacgtcatcaagctcaagagcggatggaagttcaccgacggcactccggtgaccgcgcactccttcgtaaacgcatggaattacaccgccaacagtgccaacaagcaggccagcgccagcttcttcagcacaatcgaaggctatgatgatctgcaaaggccggacgtggaccccaaggccacgctgagcggcctgaccgtcgttgacgacaacaccatcgatgtcaagctcagccagcccgactcggcattcccggtcaaggccggcagccacgcctacatgccgttgcccgaatccgcgttcaaggacccgaagaagttcggtcagcacccagtgagcaacggcccatacaagttcgtgtcctggcagcacaaccacagcatcgaaatggtgaagaaccctgactacaagggcaatcgtgtcgccaagaacgatggcctgaacttcaagatctatacctcgcctgattcggcatacgccgacctacgcggtggcaacctggacttcacgaacacgattcctgacaccgcacttacctccttccaatccgacaagtcgctgaaggcatacaacgagcccggtggcaatacgctcaccttcaccattcctgaatggctggaacacttcggccagaacgaggaaggcaacctgcgtcgtcaggccatttccatgtccatcgaccgcaagaccgtcgccgagaagatcttccacggcaccgccacgcccgccgtcgacttccttgcagccccaatcagcgcctactccaaggaactcaagggaaatgaagtactgaagtacaacccgtccaaggccaaggaactgtgggccaaggccaacgccatctccccgtggagcggtgagttcggcattgcatacaatgctgatggcactgcgaagaactgggttgaggcaatctgcaactacatcaagaacacgctggatatcgatgccaagagcatcccgatgtccacttccgacgaattcctgtccaatgtggattcaggcaagatgacctccgcataccgcagcggttggggccctgattatccatccgcggacaactatctggtacagctgtacgattccagttcggccgacggcaagggcggcaacagcggcaactacaagaaccccgagttcgatgccatgatggacaaggctctttccgccccgtccaccgaggaagccgacaagtattatcagcaaggtgaggagattctgctgcaggaccttccggctatcccgttgtggaaccagaatgccaccgcagccagcacctccgcagtctccggcgtcgcattcgactacggcggcggcccagtgttcaccgcactgaccaagaagcagtaagcagtaagtaataaacagacagcgctagccccccccgctggcgggggctgtcggcaaagccgactgggggtggtctcaaacagcagaccacccctatcttgttatatgagcgagctcccgtaagcgggagcaatcgagaacatacaggagcacattaactatggaattcaccgtatccggcactaccgtgcgattcgatgaacgaacaatgcagttcgcttttacgcgcgacggtgccgaatggaatacctgcgctgatttcaagccgaccctgcaatgcgcgcaaggcaccttcgcgttcgcggatgccacttccatcacccatgagcagcgtgaaaccggcacgggaaccggcattcgcagcatcttcaccggctttgggcacagcgcatactcctttgaaacctatgtatgggtggagcgtgcctcaggcgatgtgctcttcgaatggattccgctcaatgagcaaggcctgaacatcaccaatgtgacgtggcccgcagccatggacttcgattgcgccgacgaccatgacacgacactcatcacccatgagcaaggtgtgatgatccccaacacatggcctaccgccgtgagcaccaaagacatcgccttcgacggccgcttcgaaacggctggcggttacatgccgtggttcgcgcagctccgcgcagacggacacgggtatatcgccatctgcgaaactccatggaatgccggttacggcatcgaccatcccagcgatggcccgtacacccatatcaatacttggtttgagccaagcctcggcacaatgaattatcgccgcgtggtacgctaccagttcctcgaccacgccgatcacacggcggtgtgcaaggcctatcgttcgtacgtcaacgaacgaggtcgcctgcgtacgctcgccgaaaaggcggcgcgcaatccctccgtgcgtgacctgattggtcgttcatgggtgcacatcggcatcaaaaccaaagtacagcccgactcgtactactacgataaggaccaccccgagaaaaacgattcattggtcacctttgcgcagcgcgaaaagcaaatgcgaacattgcacagcatgggtgcaggccgactgtacatgcacttggatggttgggcacagcccggatacgacaacgcacaccccgactatctgccggcttgtcaggaggcaggcggctgggaaggcatgaagtcgctggtcgacgcctgccatgagcaaggcgatattttcggcacgcatgaccagtaccgcgattactacttcaccgcgcaaacctttgatgccaacaatgcgattcggctggcagacggtacgatgcccgaacacgcacgctgggcgggcggccaccagacctacctgtgcgccgagctcgcaccggactacgtgcgccgcaatttcgccgaaatcgccgcacacggcatcaagctcgactgtgcatacttggatgttttcacctgcaacgaaggcgacgaatgctcgaaccccgaacaccgcatgacccgccgcgaatgctttgaccgccgcgccgaatgcttcgaatatctgctctcgcacggcatcctctcctcgtccgaagaggtatcggactgggcagtgccaagcctgatattctgccattacgcgccatacgacttccagatgcgctcacccaacgagccgcgccaaggtgtaccggtgccgctgtataacctcgtctaccatgattgcgttatcgagccgtggatgatggagcgtgtggtggacggcgacgattacatgctgtacgccttgctcaacggcggagctccatacctgattcgcgatgccgcatacatcggcgttgacggcgacatggacgacgaacagcgcgctcgcacggaaaacgacatcgaacgctgccatacggtcgctgcattccatgagcgggtcggcatgcaggaactggttcgtcacgagttcgtggatgatgatccgctggtgcagcgttcggtattcgcggacggcactgcggtcacttgcgacttccatacgcaaacctatcgcatcaccgactgcccgcatcactgactgaaaatacaatgacacacagtgggttccgatggactggtggcaaattgccgccgataagcgagtaatatagccaacagtgtcaccgtcgaaacaggagtagtggaatgccgaatcgtgcagaacgccgtgcccaagccaaagcaggccgcaggggagtgccgtcgcagtatgaccagacccgtggccgtggccgttcgggaatgattgacgaataccagctgcagcagaagtcccagcgtctgcaggacggcaccgacggcaccgaatggaagcccagcggcggtacgattgcggacaccgaaaccctgctgaccactaacccgaactacacgaatccgaagatgttcaaggcaccgcattcgctgcgtcagtggttccgtgtgggcagctggacgctgatcgccatcgcgattatcgcgttcttcgtggttatgtggctgccaagccatccgatgtggctgatcatcaccgtttccgcggtgttcattgtgggtgtgctgagcctgttcttcaccgctggcgattccaagcacaatccgaatttggatcagaacggcacggcagtctgatcttttgcccggtaaatccggcttgaaaagcaaaacgcacgacggaagttgtgcgttttcttgtatgcggtgccctaaagtaagaagtgcttgagtttctttctgacgcacgaaggagaggcagtccgatgaaagttgatattctaacccgcgaatacccgccgcatgtctatggtggggccggtgtacacgccgaggaactgtccaaggtgcttgccgagcgcatcgacgtaaccgttcgtgcgtttgatggcaagcgcaccgaggcggacattcctgctatcccgaatgctgccgatgctaagggcagcttgaaggtcgtcggctatgacacgccttctgagctggctgatgccaaccccgcattgaagaccttcggcgttgatttgcagatcgccaatgatgtggacgccgacatcatccacgcgcacacctggtatgcctgcttggcgggctacatggccaagatgctgcacggcactccattggttattaccgcgcactctctggagccgttccgcccgtggaagcgtgagcagctcggcggcggctacaatctgagctcctgggctgagaaggatgcttacgagcacgccgatcgtgtgatcgccgtttccggtggcatgcgcaaggatattctggctgcttacccgaacctcgatccgaacaaggtggttgtggtgtacaacggcatcaccatggccgacttcgctaccccggcaccagacgatccgggttggaaggtgttcgagcgttaccacatcgaccgttcgaagcccaccctgctgttcgtgggccgtatcacccgccagaagggcctgccatacctgctcaaggcactgcacctgatttccaaggacattcaggtggtgctgtgcgccggtgctcctgacaccccggaaatcgccgaagaggtcaagatcgcgttcgccaagctggatgaggaacgcggcaacatcgtctggattgaagaaatgctgccgaagcctgagctgaatgctttggaacacggctgtgatgccttcatctgcccgagcatctacgagccgctgggcatcgtgaaccttgaggccatggcctgcggtctgccggtcgtcgcatccgccactggcggcattccggaagtcgtggtcgacggcgaaaccggctatctggtcccgatcgaccagctgcacgacggcaccggcacccccaccgatccggacaagtttgtgcacgacatggccgccgccatcgacaggatcatggctgaccccgaactcgccaagaagatgggtcaggccggctacgaacgcgcccgcgacgtgttcagctgggagtccatcggcgacaagaccgtggaggtctaccagtccgtgctcgacgagcagaagaagtaagtagcgctgcaacgagtgctcccctcagtccggctgcgccggccagctcccctcagggaggggagctgtcaccgtaggtgactgaggggagtcctcagatcgcgaatcatagttagtatttcactcatgacaaacaccgtcctccaactcgacaacgtcgaattccggcgcaaccgtcgtgtcatcatcaccgacgtgaacctcaccatcaacgcgggggagcgttgggtgctgttcggtccgaacggcatcggcaaatccaccgcggtcgacatgctggccacccgcacgttcccctcggaaggccgcgtattcatcctcggccatcaactcggcaaatacgacgtattcaaactgcgcacccgcatcggtctcgcctcggccgacctgggccggcagttccccgagttcgaggacccgctggacgccgtggtcaccggcctgtccgccgtgaccgggcgctggcgcgacacctacacgcaagagggatacgcccgcgcccgccagctgctgcgcgattttcgcgtctcctatctggaaggcaaggagatgtggcgactgtccgaaggcgaacgcacccgcgtgttgatcgcccgtgcgctgatgggcgatcctgagctgctgatcatggatgagccgactactggcctcgacttgggtggtcgtgagcaggtgatgcgcacgctgagccgaatcggcgaagagaactccgagcgtgccgtggtgctggtcacccatcgcttggaggagattccggccggtttcgaccacatcgctatcatgggacgcaagccgattcccgctgaggacgccaccgaagcgggcgtggattcaatgggtaatcccggtgctggcaccatcgtctacaccggttcgttggagaatggcctgaccgacgaacgcttgtcggaattgttcggtatgcccatcgaagtccagcacacccacggccgctgggccgcctacgccgtgtgatgcttgtaggtttttaggcgggattttcttcgccccctctggaggggctgtcagcgtaagctgactggggaaggtccaaccagttacgaaggcaaccatgacaaccaatagcaaactcgtattcatcgatatcgacggcaccctagccgacgaaaaccacgtcgtacccgaatctgccagaatcgcttgcaaacaagcccaggccaacggccacaagctcttcatctgcaccgggcgttccgtgccgaaaatcgaacgcagcatcctcgacctcggtttcgatggcgtggtttccgtggcgggcgctcaggcgaatatcggagacaggctgctgttccagcatctcgtccctcctgaagcggtcgatgcggcgatggcgtattttgccaagcatcatatcgagagctaccaatggcaaggtgcggatggcatgtacatctcggaaggctaccgtcaacatctggaatcgaaaggcaagacctggaatcgtggcgaattcgcgcgattctggcacctgttggatgaggtggaggtgccgactggctcgactttgggacagacgattcgtgtgagcaaggggtcatacttcacctcgccgaatcctgacgtgactttcgaggagactcaacgtgatttgagcccatggtttgagctcgtgcatggttcgtatgacaatatttccccgaacaatggcgagttgctgattaatggcatcgacaaaggtaccgctgtgcgcgacgtggcttctttgctgggctatgccattgccgacaccatcaccatcggcgactccgacaacgacaccgccatgctcaaggccgccggcacatccgtagccatgggcaacgccatccacggcatccaagccttctgtgacttcaccaccaccgatattcacgaggacggcctggccaacgccttcaaaacgttgggactggtgtgaggctatgtcgtttgctctcagacgaaggatcctttcgtgctgtagtagtgagaaataagttgaatatatactgaacggggaaggagggaacgatcttatgccgacgataatgaaagaacagatggaagtcagcattcgtgtcactcctcagcaggtttttgatttcatcaagcagcaggtagacaccaatggaggctttgatgaggatactcgaccagtgcgggtgcatgattcagcttatttgaagcaacttctggagagctgatgagctccgccgtatgtgtcattttcgattgcaatatttatatcgatgtggcacaacgtatgctgtgccgagcatagagaattgtgaattcaaaatggtttgttcatcatgcgaagatagtggtcatctgtccgtcgcggttgcgcaatttacggtggcggaggagccggaacggaatctggagattattgacggatttgcgcgtgatgctgcgattgacggatttgcgcgtgatgctgcggcgggcgatagggaagctgatctcattactgctgagctgagtcgtgagtgtcttgattccgcgcgtcgaacattgccggtgttgcagaatcgccgttttgccgatccgcagttgtgtgactgacctctgaataactttactggcgctgttgataagggttctatgatgggaatcatgaccactactgttgatagctctgattcaatgccggaacttctgcaagaggggagcgcggcgcccgatttcactctgccggcggttatacctgggtttacagagagcggatcaatcaacctgtctgacgtgcttgatgccggccgcaaggtagtgctgtatttctacccggccgcgatgacgcccggttgcaccaccgaggcttgcgatttccgcgacaatctcgcccgattggcgtcgaaaaacgttacggtgcttggcgtctccaaggactcgcttgacaagctgcgcaagtttgcacagcgtgatcatctcacgttcccgctgctgtctgatcccgacctgaccgtgcacaagctgtacggcgcatacggcgaaaagaagctctacggcaaggtgcacgtaggcgtgatccgctcgacgctcgtcatcaatcccgatggctccgtggcgattgcgcgctacaacgtgcgtgccaaagggcatgtcgaatcgctgctgaaggcgctggacaagctggagaagccggagaagtagtgcgttctcgttgttcggacacggtggttcgtgcatagcagctccgcgcggtatgtgccgtatgaaccactgccgtatgaaccaccggttgacttctcggactcaccggcaaatagtgagaccgtgggcgcgcagtacgtctatggctggcatgtaatcgagcgatgttgcggtgggattgagcatcagttcgcggatggcggcggatgctgaggactcgcttgtcttcgaggattctgcggccgggaagagagcgtcggcgattagggagatgatacggtaacgcgcatcgccggcattggcattgttgctgctgttgccggcgtcggtagtggcggagttgccaatagtagcggagctgttttgtagagtcgtatccaacgctgtggcaagcggctccaggttgttctttgtcgcctcggcaatgtcatcgagctgatcgaataaggcgaacagccatgcacgactttgctcctcatcgttgccggtcgcaagcctttcatcggtgacgcgcacgagttcgtcaatcggtactgctggcgtctttgccggatcgcgatgctcacggttgtcttcgatatcgcccataagatgctggatttcgcactcgtcctgcaatacggtggtctcggcaaatgcggtggcgatggcgtccgcatcgatgaacttgccaccttcggactggaagcgcacgcgcttgggctcactgtaataatgcgacatgccgaatgtgatgtactgcggcatctcatcctgcaattgcttgaccgcatccgccaccttgcgcatgtccgcaagctgctgatgcaccacaataaaggcaagtattgctttggcatcggcgagagtgagcgactgcccgatactggctccatgatgatgttcgtgatgcgcaaacatgttcttcagcgaatcaaacaatcccataatgtcctccttcggactggggcacaatcggctacatctgccgcttactgtagtcctgaatatgtgggaatggtccatggaacgccgaaagcgaatattggttccgggcgatgctcgcagcaactgaaaatatcgcaggacatgacaaaaagcgggtgacaagcgttatcctgaaatacatagggcaaggaggccgtatgacagcagaagtggatgacggtttctttcaattgtttgaacgcaggatttttgtgcgtggagaagcttattacgatgccggcaaggttgatccgccggtcatgattgctgagaatctttggcataccgtggttcgcgggaatgacgactatcaagtggacattcgtttgcgccatggcaaagtgatttctgccgcctgcgcatgccaatattcccaacgtgcaacgtactgcaagcatgtggctgcggtgcttatcttcatgcgtgagagccgacgtcgggaattagatgaatcgcaagaccaagtttcagagtttcctcatgaagcattgaattgtgtgaggtggtatacgatgcatgaattcccgaaatatcgcggattgacagagggagattggcatgctgtcaagcgaatatttgaggtgttgtactgtatccccgaccttgatattacatatacacatgaggtaatggataccgtttggtgacatccatctcgtaggtaaacagttcgctgtggccaagacgctgagtctcagggatattctcgtccgcaccgagtcccactgcaatcacacgccaaccccgcacagcgagcatccgcgcagtcgccttgccgatgccgctcgtgccgccggtgaccaatgccaccggccgtccgtcatccttgattggttccgtgtgtaccattatcgcgtggtggtgtcggaatcacggcatggtgatagcagccgcatggaacaagctacttgctaggcgaagattgagcatcgtcatccgtcttacgagcattcagatgccggtgctcgtattcctcgaagtcatcacggacggcttccgcgggatacttgctcttggtctttgcgagcttgcccatgacgatgtcatccatatccacaccaagcgcatcggccatcatgatgcaatacgtaagcacatccgctagttcttccctgacatgttcctcatccatggatggcgactgcggcgtccactggtagcattccagcaattccgacgcctcgatactgatggacttcgccaggttctcaggagtgtggtattggccccagccacgctccgacacaaaatcacgaatcgactgaatggtactgtcactgatcatgactgacattataggacttgctgaatgttggtcatgtaccagagctcatgatggaccataatatgattatgaacagtgagagcttggcgccgtttgtcatcaacctgccatatggtcaatacagtagggaagcttttgaaaaggcttttgacgaatccctcgagaagcagatggggcgcagtgttaatgattccgatctggaacatttcatgctgcgatatgtgttggcatatccaacggtttatgtcgtgtattcaggaaagaccaatcgctattcgatgaagaacgaatatacggtgtacgtcggtgagaccaacgatatacggcatcgtacattccagcatcttgaaagagatgctaaagaacgcgaggactggaaagctgtagctgatgctgtctcgcggaatgatgatgcatatcggcaatatgttatttcacatcccaaattcaataagtcgttaaccctggatgtcgaaaaccgtcttatgcactatatgtccagtaccgattcggtgaaaaggctcaacaatcgacggaccaatgcgcaaggcgattattacaccgcagaccagtttgattggattttctcgcaaatctggttgagattacacaaggaagattctgacctgttcccggcggaggagatcatccgagattccgcgttgttcaaggcatcgccttttcataaactcagcgatagccagctcgaagccgaagaatctattttggtgcaacttgccgccttggttgccgatagccggcaacagaagaaagccgatgagcaatcttcagatcgccatccgaaattaatctttgttcaaggtgctgcagggacaggcaaaacggtcctgttaagccacctgttctacagaatcgcggctgaaatcggcatccaaggcgacacctattccgaagacgaagattatcctgagctgtcacaaacggcgaacggccggctttcctcatacattcttgtcaatcataaggaacaggtgcacgtatataatcagattgccacgaaactgggtttgcagaagaaatctgatgaagtggtcatgctgcccagtcagttcatcaatcgattcagcttacgcaacgagcatggtcgaggcattccagaccaaccgcaaggcctggcggacatcgtgctcatcgacgaggcccatttgttgatgacgcaaggaaatcagggatattccgggaagaaccagctgtatgacattctgcgcagagcccgggtggtgattgcggtctttgatcacaatcagattatgcagtccagccagcagtgggacccagcgatgctggaaaaacttcagctggactctgattcgactcagatcgcatgcgcgaccgggaaaatcggcgcattcaaagcggttgatttgggcgccgaatatcatctgccgtccatttccgtggacattgcgcatgtccatttgaaaaagcaattccgtattgccgcgagtaagtcgatgattcagtggattgaccgattcgcttcggggaaaggtatcggtcctatgcccgctgatacgggcgagtatgccgcagatggtgaagtgattcgagaaccttatgacgttaaggtgttcgattcgccggttgatttgtttaatgccattcacgcgaaagcccagctgaatcccgatggttgggatggggctggactgtcccgtttgttggccacctatgactggaagtattcggcgaaatctgagaatcagaatgatccgcatggcttttggaatgtggaactgcatcgcgatacttccggcgtatggcgtatgggacttgcggatgaccatggattcgatcattccgcaataagttctgaccaattctgcaagccttggaactatcagctcgaagattccgctccgaaaagcaggaaaggcatcgacaaagaactgtcttgggcggagaagccgtacaccatagatgagattggctccatcttcaccatccaagggtttgatttgaactatgccggtgtgatcattggaccctcggtgacgtatcgtaacgggggaatcgtgttcgatgcaaaggccagccaaaactatctggcaaccaataagcgcaaagatttaggagattttgccgaagaaaatttgaagcatgagttgaatgtcctgctcaagcgcggcgtccacggtctgtaccttttcgcggtggacgaaggcctgcagcagcgtttgaaggagtgctgcatccattaaggtatgtgacggatattgtgctgaaaatgcacgcgaagcgcacgcagatgatgttgaatgcgctgaaaatgcactcaacatgccgggtgtcgtcgttcgctatgccaaaggcaagggattcctcatggacgagcatttggccaaggcctgggtttgcagccagctgaccaatatcatcaggaatctcagcgaagaacaggctggcatttctctgcatagtcaatggatatgtgccgaatgccgtaccgcgttgccaatgtcgtcactacaacgcaaacgccagctcttcccgcaacgcagtacgattcggataacgctcaacaatctcgtgtgccagcacacgggtctcctcatcgccgaacactgcggcgaaacgacgtagctgtttggcgatctgctggtatgtggtgcggcgcgccgtcaatgtattgtcgacgccacgttccaccgtaaaccggaacacgggcgcgcccatggtgccgtatggcatcgcttcgaggattatcgattttgccgattcggggtgttcgatggcgatggtgcgcagcaatggcagcggcgggtaatcgacgatggcgcaataagtcagggccgcgtccgaaagccgctcgtccacgatgagcttctcgtaagcgggattgcgccaactgctgtggcgctgtgtgccgcctttggtggttatttccggctggtacttgatgcggtcgatgatgttccgggcgcaatctctggccagcccatcagccacgtcatgccattcttctgcgctaagaccgccgtagatgcgtaacagattgcgtagtttactcacgtaatgggtatcggatctgtcgttgcaggaaagaatgtagtaccgatacacgttggcgagcagtccaacgtcattgagtccctcggcgcagcattccatgatggtatgccatccatggggcagcaggtccggcagcagaccgttatgtcgggcatcgatatcgacatcttccatatcccggctcgacagaaggaaatcttgtgcgagcatgtatgcggaacgcaagtgcccttcatgaatcatgttcgcagcgttcatcagcgtgagggccattgactccgagtattcgctcagaagctgctcgcgtccagcgtcatcgttggatagagcgtataggtcgtaggcgctcatgagtgtgaacaactgcaatacgtgtaacgattcatccggaatgaagtcggtttcgtcgtctacttcgctcgtatcctcgttatcctcatcctcgtcgtcctcgtcgctttcttcgctctcttcgttgaacgagtattccagattgcgcgttatcgcgttctcgatcacgtcataggcccatatgcgtttgttatcatattgggcgaaagcgagcgcgctggaaatcagcaacatactgttcaatggttcgcattgccgcatgtctttgtcgttcgcggcctgcgcaatggtgttcaatgccttgccggcggtagatgagtcggcgaattccgccacattctccatatagcatcgcacgcgcatcgccagatcatccataagcgtgagcaaaggttcggagccatcatcgttctcggacgagagcagaagcgcgtggacttcgtgtatgcacagtcgcaggttgccgcatgcgctcgcgtaatcactggattgcagggcattgcccgcgatagcctgcacggttttgatgaattctgtgtagtcacatgatttgctgtacgcatcgctgtgtttactgatatgaataatgaaacgttcatggcatcggcggattgtgtcggagagcatggtttgtgcgtcgatcagcgggattagcggtcgttcttcgtctggctgggcgcagaacgtctttgcggcttcgcgcagttgggtggaccacaggaacagcagatggcctttgccttgctctgcgcgcgcgtcgaggtgttgctggatgggatccagcacggtgcgggggagtgcgatgacgccatcgtgagcgtcggcggtgtcatcattgtggtgattgccgtgcgcgccaatgagctgtttgcgcagttcgtaaagcacggcacctatatgcttgcaatatggtgttctctgatacgggcaggtgcacgcggcggattgtatgcgaatcgaattgtcgtcggttgtggattcgtggtcgctgttactgctggtagtggcttggtcatcggtgtttgcttcattggtgttctcgccgtgagcgtctttgccgaggcggatgtcaacgtcgtaatagtcatcggcactgccggacacctgcgcgttatacagctgcggcgcaatctcctgcaccgaactcacgcggcccgattcccagtaatcggtggcacgttcaagaatcaacggtgtgccttcgaacatgacctcgaattgagccagcgttggcttttgcggaacaaccatactgctgattgtagcgggtggagtgttactcgccgcttggcggtgcatactggtctgatgtagtcttgtttccactgggtaatcgcattcggggaggggagttaaggaagcgcttaacgagcatagggcttcagccgctcctaatacgcccgaatcgcgccgaacgaatacaccgcgatcgcgacccaaatcaccatcaacgccgcatagccctgcgcgcgcatcggctcgtgcagcaggagcacggccacacagaactggatcagcgggttgagatattggatgaaactcacggtcaggtaatggctgtgctgcacgccgtaggagaacgtggccagcggaatcgcggtgggcaggccggagaaagccaccaacagcgcgaccatggccgccaacgtggcgaccaaacgatacgcgagcacgctgatggcattcatactggacagtgcgcgccagtacagcggcagcacgccccagccgatattggacacgagcggcgcggctatccccattcgcgtctgctcgacggtacgaaccgaagtcacgtctcaccaccatagcgactgatcacatgagtgtcccgcacctggtcacatggcatattggacttgctgatgatgaacagtaccggttattgttagagtcttttccacagaacacggagattgaacagatgattcggccttttctgagggcgcgaatcagattcgtaacgcagtggtttgccccagactctgttacggtgataataacttcatcgttgataagggagtcttcatggcaggcaatggcaacacggcatttcgtttccgagtcactttgcgccttgacgggcgtgaatgctggcgggagattctggtgccggcatcattgacgttcttcgatttgcatgcggtattgcaggaatgctttatgtggtacggcgagcatctgttctgcttctgcgccacatttccgaatgggaagcaggtgcaagtggaagaattgtggggagaagagccctcataccatgaggcgaaatacgaacaatatatgccggtggagccgttgccggaagttcgcgttgcttcggaaaccgagctgggcgacgtgtttcccaaggtgcgtaccgctcgctattactacgattatggtgacgattggatccatgatattaagctgctgcgtacctaccgcagcgtgcacgttgcggatcctcagctttgggatggggctggggatgcgcctccggaggatgtcggcggggtgtatgggttcgagcggttccttgataccttgggcaatcccgaagatgaagaacatgatggcatggttgagtgggccgaggaccagatgtgggatcgtttcacgctgaaccgccatcgtgagcgtctgttccgttggcacaagcaccgtgacatgatgttgcatgggtgatgctgaacagatgatagccgaactgcattaggctactacgtcccacaccgtaatgtatgaccaatcattaggaggcccgtcatgactgctcatttcgacgagttcgaagaggagatgacctcccgcagcctggagcgagcatatgattacgtggacgagcataggatcggtgggttagaggaagtgtcggccggactattccacgccgaagtgcacggttctgaactctacgatgtcgatattcgacttcgtggcaacgatatcgtgttcgcatcctgcacctgcccctacgactatgacggatactgcaagcatattggtgcggtgctcttgacgttgcgtgattacaaacacggcggtaatcatcagcagaacgtgacatacgatgcgatgattgcaaagcaggacgactctcggccagacatacccgtagcagcaaatcctctcgcatcgaaacctgaagtgttcaatcgagtgctgcaacatattcgagaacgagtgggactgcgcaaatcagaacggtggacgcccgctcagcatttctatctggtttggaatcaggacgaaatcaatgccatcgtgactgcgaatccggcaatcgcgagcggcatggaaccattgatgcccgaaagcaccgtggatcgcgtcatggaatctcccatgcggcgacatctcggcaaggactacggctggaaattcgaatggggagatgccgccataaacggcgtgatggccgtattcgaggaagcagaacaatcgaacgactatccgctggccatgagacgcatgtgcgcggctttgcgaaaaacagtgtggttcgcgagacaagtcgatgatgaagagggtgcgctacagacatatatcgaacacctcaatgagcggatcctcgcttatacgtatgccgcggcaccaatcgttacaggcgagcaagcgcagcagatgctgattgcagcgttgagattcatacgtgatacccctatggtcgagatgctgttttggccgcacacgccgctggaatgcgtcatcccattcgcggatattcacgcacgaggtacggcggacgtagaacagatggagcatcagccccgcgagatcggcacgacctcgttcatgtgccgcacctatgcgcagtccacattgaatgttgcccagcaattccttcatgacaagaagggggattccattgacggccatcgaacgaacctgaccgattacgattggcgagctgcacaggactatctgatgaaactccatcatgactttctgctgtacggcggcgacgcaattagtgccgatgagctactgtccaaaaacacggacgtggccgaatgcagatttgccgtcatcgcacgtaaattcctggacggggattatgccggggccgccgctttcttggaacagacttacgattgggatgccgcgcaaaagcatgcggggtattgggagctcaccgctcaactgccgcatggcgagcttaccatgctggaggcctgctatgaacgactgaacgatgagaacggcatcaaacaattatatgagtactacgtcgctcacagtgattcagtggcggacgaacgttgcattcccatcctcaaatcgatggtcggcaaatcgggctggcctcaaagcgttcagaacatcctgcgcaactatcatgagcatgatttcggtgggaaagtccttgcacgactcatgactgaagagcgcctatccgatgaggccttggccttagccgggcagcggccggaactcctgcgtgatttgctcaagcccatcagcctcaatcacagcgcggaagcagaacgactgatcagaaagcaactgccgctggatcgcgatctgcaacagggaaatcgcaacgaataccgattcgttgccatgtggatcgagcaatatcgcaacgttttcggactcgaccaagccaaggctctcgccaaggagatcatggcaaagtacccgagacggtatgcattcaaagaggaaatcggccgtgtgctaaagtaacttactgataccaaaacattctaacactactccgacgatgccccgccaccgcggccacaagaatgcacgcaataccgaatacgcgcagcgcgccgcctttgacctgcgcattcgggcggaagaaaatacaccaccaaatcagatacagcgcatgaccccacatcagctgccgcgaacggctaaatctgccgagttcatcgagttcaccggccctattaagtccctcaactccatcaatcgccgtctgacccatcacatcacgcttcatacacattgccgattgacagtcctagaacacagtctagaactgtcatggtatgttcgcgcagataagggctccaacaaaattggctaaaagagaactcggcaacctataaaaagggcgcgcccgtgtgcccttatcgttcagctccgctcacgaatgaaatcgaaaatcacgtcgaagacctgctggctccaaaaatcgtactcatgttcggcgccgtcgactagcaccagctgcgcgtccacgccgtgctcggccagccggtcgcgcatcttgacggattgatggtaggggaccacggtgtcggcggtaccgtgcaacaggagcatcggcggatactgttggtcatcccgcacctgcaggtaggggctcatgtcagccgcgcgctgacggacctcggcattgatgccggtctcatgggtcgcgcccaccacggccgcgaacgggccgaaataatacagccggaatggattggtctcatcgtcgaatgcgtcgactgcttcaagcatgtcggtgggcgggaagcagctgaccacgtacttcaccgcatcgctctcatcggcattggtgccgtcctcataccgcggctcgtcggcggtcaaccccaccagcagcgacgtgttgccgccggacgacgtgccccagataccgagacggtcggggtccacgtgccattggcgcgcgtttgccctgagatagcggatggctgctttgacgtcctcgagatatgcggggaacacgtcgtggggatcgctcgaggcatcgcgatgattcaccgtagccaccacaaagccttcgcgggccaaagccgagagctgcgggatctcgtagtcgcgatgcggcgtggtccaggcgctgccttgcacgaataccacggtggggtagcggcggtcatcgtcatcgccggtggattgcggggcgatgatatccatcaccaggttatcggccccggtcttgtacgccacgttgcgggtcagcgtggccaatccggcaagcgtgggattgtgcgggatatggatgacattgtttgcgccggcgttggcatcactgactttggctgaatcggtagtattcatggaatccccctagctctgttgctatagaggtcatcatacaagaaatgggcatgattacggcacaacgatgtctcggtcacagcgaagacatgaaggcgcgaagacgcgcccggcagcgcgcgctgcctgcctgcgagttgccttcaagtgcacttcaagcgataaggtgacataagccgcggcaatggagattgctgcccggcaacgaggcggacagtgcccgttcgccgattcgcgataacagaaatgagacactatgaagactcaggaaatcggacaatccggcatgattgcgtcacgagtggcgctgggcgtgatgcgcatggacgcgttggatgccgccgatgcggcacgtaccgtggccgtggcccatgattccggcatcgactatttcgacacggcgga

SEQ ID NO: 3092 - DNA, 78383 bp, Unknown
  R215_18m  MAG No. k141_644
tagttcggccccgtccggcatcgcagacagctcgcacagagctcgactgctgccggacggggccgatttcgcgttgtggcagagggcttcgcgggctcgatttctgcccacattttgcccacattttccgtaaaaacaggttaaaaaccgttaaaactggttaaaacgaaaaaagccgctcagccctactcccgcaaggcaaagcggccattttccaacccgttctcagctcagcgcgtccttcaacaaacagaagaagcaccatccgcgccagccgggacatccgaatcacaacccgcacccatccaacagcaaccatcaaccaacaccactcgcccagcgccagacactcccgtcacccctcagcccacacctcgaccgtctccctcagccccatcatgggacgtgccaagcaccgactcaccctcaacttttcctgacactttatgaggggaagatgacgttgatgtcatctgaaacttacatggacatctaaaaatagggcgttttttgacgtttttcattgattgatgtaagttttggcgtgccaaaacttacatcaatcaaaatccacggcttttctgatgacggataatggcactggagctgtgtcttcgataaggtcaatatcgagcgtttgatcgccgcaggattcggagtcgcatacaacccggtacgcatggccggcaagtagtcgcagcgaataaataccaccgcccctcccccagcagtaacgctggacggaggggcggttttcgcgtatttacgctttcatgggcggaagattgaaatacaatcgggcgattcgctcagcttcgcggttctccctctcattaccaagcaacagaagccagatggcattcttccccgctagaggaatcggagcctttagctgctttatacagccctgctcttgtaaaaactttgcaccacggctcagtcggtttcgcgctgtccgtgtgcgggccattgttgtttctgcggcagtgtctaaatcatgttccttggaggcgatgaccatgcccataccctctatcatcttgtcccaaccctcccaataacaccagtaggcacggttttgatatacgacggcgttcacatcctctttgtcgattaccttcgaggccatgtaggtcatcatcgacaaagccagtaggtctagcgtctgcttgccgttttcatcagtcttggagaatttgccttggcttgcgagagcatatacgcgatctacattgcggtagcccatctgttccgtcatctttcctccacgccctcgactaaacttgggagtggaactcttgctagggtttcgtttttcaaccctgtggagtcttcacctccatagggttttttattcacactcacatgataacagatagtcacaccataatgggaatagtgagtcacagtcaacgctgattattgctcacaccgacatgtgaacatacatggatagatactaaaaggcttacatgaatatttatacaaaaaccgatttttgatttttcgagcgaatcaccgtcgattccgccacgccgaaaccgttccgcagcccaacccgaagatttgttggagaatgttggagaatgacattcctagacgccggaaatcttacccgagatacgatgagaccccttgcaaacattggcgttcgcaaggggtctcaatgcctaatcagcgagtgattcagcacaccttccacatccagttgtgcgggtcctcgacttcgccgagctggatgccgagcagctcgtcgcgcagttcgcaggtgagcttgccggagccgccgtcggcgacggtgacgtcgaacttctcggacttgaagcgaccgatcggggtgatgatggcggcggtaccgcaagcgaacacctcggtgacttcaccggacttgatgtcctcgagcagctggtcgagggcgatcatggtctcgaccacgtcgtggcccttgtcctgcagcagctgaatcagagagcgacgggtcacgcccggcagaatgttaccggtcagggacggggtctccacgtggccatccttgtgcacggccatcatgttcatgccaccgagctcttcaaggtaggtcttggtggcggcgtccacaaagcacacctgctcgcagccattctcaacacccttgtactcgccgagcagggaggcggcgtagttgccgccgcacttggcgaaaccagtgccgccagggccggtgcggaaccacttgtcttcaacccagatgctcaccggcttgacgccgcccgggaagtacgggccggacggagaggcgatcacgcagtagtcgacctcctgcggggcgcgcacgccgaggaacggctcggaagcgaacatgaacggacgcatgtacagcgtgtactcgcggcgggacggcacccagttggcgtcgcgcttgaccagcgcggccacggaaccgaggaagtcgtcaatcggcagctcaggcaggtacagacgcttggcggagttctggaaacgctcggcgttcgcatccgggcggaacagccaggtggagccgtcggcatgacggtaagccttgaggccctcgaagcactcctgtgcgtagtgcagcacggaagcacccgggtccatcttgagcggtgcgtacggttcgacgcggcggtcggaccagccttcgcccttggtccaagtcatgtgggtcatgttgtcggagaacacctggccgaaagccggcttgtcgatgagggactggcgcttctcatcggatgcggggttgtcgttcggcagtacggtgaacggttcggtgagcttgtcgagtgctgccggatcgtggtgcgtgttttcagtcatcactagctacttcttcttgactttggcggcccgaaagccaccatatggggtgtgtgctgtgcgcttgtggcgcgaactctgttgcatacttttgcacacccatgtgttactcgtgtggcagagttcacatggtgaaaaacgaagaagcccacaccgttctcaacggctgcgggcttccacgtttcagttatgttctgaattgttcgctatcgaagcgaccgactcacttggcgtcggcggccggagcagcagcggcgtcagccggggcggcagcagcttccggagcggtggtggactcggtggcatcctccggcacctcgacggtgacgacggactcttccggatcctcgacgtccagctcgacgccctcaggcaggacgacatccttggcgaacaccttggtgccgtcggtcaggccttcgacgctgaccacgatcttctcgggcaggttggtgacgtcggcgcggaccttgagctcctgaatgtcgacgaacgccacggcagcacccttcggggtgccttccacgaacaccggcacctcgacgtcgatcttctcgccggccttgacctcgaggaagtcgatatgctcgatgatgcgcttgaccggattcttctgcacgtccttgacgacggccatcttggtgttgccgtcgaaggcgatggtgaacagggcgttggtgtgacgcagggccagggtggtctcgcgcatcggcaaagtcacgaaggcgggctcttcgccgccggcgtagatggtggccggaatcttgttggcaacgcgcagacgacgagcaacgcccttgccgaactcggaacgggcctcgccctcaagcttaatggtggtagccataatggatactccttgtatcttcgtttcgtactgtctcgctcagacgccacgacgcgccgaaagacaccctacaaggagtgaaatacgccgagtcgataacggaatctgtgtcatgtgtcagcatgcacacttccctcgccaaagcaacaattgtcaagtatacgccaaccccggactttgcgtaatgatgcttcgatgacactgcatataggccgtcccagctacgtcaacgtacggtttccgcgaaataatccctaactttgtgaagaacgtacgcttacccgttctcatcatacggttttcacgaaatcgttcgccatttcgtgaaaaacgtacgctcagcgacactcagtgtacggtctttcacgaagttggggatgatttcgataataacgtacgatggtgagtaccatatcgggaggttgatatgactcgttcggacgacgtcatcaatgaggatggccatgacgtcatcgccgcacacactcgcgttgtcaggggcatggctgcggcacttgccgcgatagccgccacaggagccggcgtcacagccgcggccgccaacgtcatgttcatgttcgcgctggacaccaaggccaaacgttcgatgttcaacatgccgcacgaggagacgccgaaaggcatcgaattcgacatgtccgagcagcttgaggccggccggtggttcgaggaggccaagcaatcggtcacgctgcgcagccatgatggattgaaactccacggctggctgttggacccggattgttccgacccacagccgcatctatacgcgatctgctgccatggctataccggagagcccgcggaaatggccaaatgggcgcatcgctatgcgcaactcggttttacggtcctgctacccgcgcagcgcgcccatgaattgagcgaagggcgctacgtgggtatgggattgctggaaagcgacgatctgttgggctgggtttcgctgatcaccgcagctgatccggatgcacgcattctgttgcatggcaattcgatgggcgccgccacggtgatgatggcggccggcgatgcgcgactcccccgcaacgtcgtcgccgcgatttccgattgcggatacagttccgtggtctcgcagtttacggataatgccgaggcgatgttccgtttgccgcactcgttggccgtgctgctggtcaaagtggccagtcatgtgtctaaacgcaaggctggataccggtttgaggacgcctcctgtgtgaaggcattacggcacgcgactattccgatgatgttcattcacggcggagcggatacttttgtcaatccgaagtatctggacatcaattacaacgcctgcgccagcatcgaccgcgagaagctgctgattcccggcgccgaccacacgatgagcgccagcaccgatccggaccgctattggcgtcgcgttaacggctttgttaagcgggtgtttgggctgtagtagatatagagcttggctcccctctgtgaggggagccaagaatggttacgcgagcagttccttgacggcggcgatgacggactgcagactcttcttcgcgtcaccgaacagcatctgggtgttgtcctcgaagtagagctcgttctgaatgccggcgtagcccatgccgcggccacgcttcatgaccacgacgttctgggacttgtcgacgtcgagaatcggcataccggaaaccggggtgccaggacggcgagcagccgggttggtcacatcgttggcgccgacgaccagagccacgttggcctgcgggaactgcgggttgatctcatcgagatccacgagctcctcgtagggcacgttggcctcggccagcagcacgttcatgtgaccaggcatacggcctgcgaccgggtgaatggcgtaggagacttccacgccatggcccttgagcagttcgccaaggtcagcgagctcgcgctgggcctgagcctgagccagaccgaagccgggcacgaagatgaccttctgcgcgtagacgagctgaacggccagatcgtccggcgtggtctccttcatggtgccttccggaccgtcgccagcagcggcggcgtcagcaccaccgccgaagccaccggccaagacggagagcagcgggcggttcatggcctgagccatgaggatggacagggtcacacctgcggaaccgacgagtgcgccggccacgatcagggcaacgttgtcaatcgccagaccggacatagccacagccgtaccggtgcaggcgttgagcacagagatgacgacgggcatatcggcgccgccgattggaatcacgaagaccaagccgtagcacagggcgaacacggtggtcagaatcgaccacagcagacgctgttcgggctggacgcacagcatgaccagcgaggcgacagacagcacggcgaacagaatgttccatacgcccttgcccggcaggttcagcttcttgacccacttgatgccctgtagcttgccggcagcgatgagcgagccggtgaaggtcacagaaccaatgaggataccgagaccagcggtgatgagcaccacgatgtccggggtgccttccttggtcaggatgtcgttcagggccacgagtgcggcagcgccaccacccacggtgttgaacacggaaaccagctgcggcatgtcggtcatcttcaccttcttggcggagacgacaccggccacggcaccgatcaggatgccgacgaccagcaccaccacggcgacaatgttcacgaagcccttggcgaaaagcacgatgaacgccatgagcacggccacgaccatgccgaacgcggagatctggttacccttgcgggcggtcttcggcgaattcatgaaatgcagaccgaccacaaacaggacggcagagaacaggtagacgaaccatgcgacgatgtcgatggcgccaacggttgcggaggtcattacttcgactcccccttcttctcgttcttgctggacttgaacatctcgagcatgcggtcggtgaccacataaccgccgacgacgttcatggtgcccagcacggcggccaggaagatgaacacgtaggccagtgggctattggcttcggctgccacgatcacaacgccgacgatgacgatgccgtggatggagttcgcgccggacataagcggcgtgtgcagggtggcgggcaccttgccgatgacctcgataccgatgagcagcgcgaggacgaacagggtaatggaaacgacgagagtaggcatggtattccttcttccttacttctcggacttctcggcatcggcagcagctgccggggcggcggcgcggccggcaaccaccagcgcgtcgtcaagttcttcggtgagatcctggccgagcttgccgtcacgcacgaagtgcacgaggatgtcggccacattgcgcgaaagcaggttggatgcggtggtggcgacgccggaggccaggtagggagcgccaatcagcttgacaccgccctcggtgacctgctcgccgacggcggaaccctcgacgttgccgccgaggtcggatgctgcgcagtccacgatcacggcaccacgcttgagacccttgacgccggctgcggtgagcagcaccgggggcttacggcccgggaccttggcggtggtgatgatgatgtcaaagccggcggccttctcatcaacggcatcctgctgctgagcctgttcttcggcgctcagcgcgcgggcataaccgccctcgccctggcccttggagaagtcaagtcccagatcaaggaacttcgcgccgagggactcgacctcgccctgggaggcgggacgcacgtcgtacgcggtgacgaccgcgcctagacgcttcagcgtaccaatggcctgcaggccggcgatgccggcaccgagcaccagcgccttggccgggcgaatcgtgccggcggcggtggtcatcatcggcaggaaggaaccgtaagcatcggcggcggtgatggctgccttgtagcccatcacggagttctgagaggtcatctcatccatggactgggcgctggaaagcttacggggtagcttttcgatggcgatgcccaccagaccggccttctcgagcgcggccacgtaatcggcatcggtgaaggaaccgagcatgccaatgacccactggccggccctgagcttggccacggtctcggcggacggacggtccacaaaaccgagcgcgtcggcttcggcgagcacctcgtcacggctggtcaccttcgcaccggccttttcgtaatcctcatcggtgtattcggcggcaatgccggcaccggcctcaataatcgaggagactccgctcctcttcagccgggtgacgatatccggcgtcagcgcgacgcgggattccgtttcggacgtttcgttcaaaacgccgaacaccacggtggcttctgggttttgcgccatgagagccctttcttgttctacttcaaaatggacatggttatccgcatagaaagtgtagtcggaaggtaaagaccatgacttgagattccgccaatcgaaacagaaacgaacccgaaattagtgagaaatacgaatgtatccatgtgcattgcggatgaattgctcggaagtcgtccaacaatcacccggcatcgatcagcaaccaaccgctcagtaattatcgacaatcaccgtttcgtagttcacggttactcaacaatatcgggacctgtgcaatattttgccacgcactcccctaacccgccagaatcctacggttgcgtaaggtgacgagttcggtttgggcgattacaatttgaactttgagaagcgttcgcctcatggctggacgacactgaaaggtttacaggagcaagacttgtcggttatcaattccttcacgcagcacactatcaatctcacccgtaaggcgctcaggttgggatccgacttcgtccacccggtccacgacgacaccccggacgagcccgattacctgtccaatgccgacgtgccggtcgagaccaatatcgctttgcctcacagcgacgattgggacgacggccacctgaccgtcaccgacatcgaccccgccaccggcctgctcaccacctccaccgaaggcaatccgccgctggacgaaggtacgtccatctacgacctgtatgcggaccgcgccgaacgtatgggcgatgagccgctgtacacctacaagtccggcaacgattgggtgaccgtcaccgccaacgagttcctggctgacgtgcgtgccgtggccaagggcctgattcattacggcctgaagaagggcgatgccgtggcattcatgtgccgaacttcctacgactgggacctgaccgacgcggcgatcatggcgtgcggcggcgtgctcgccaccatctacgacaccgattccgccgagcagattcgcaatatcgtcaacaactccgatgcccgactgctgatcgtgcaggacacggacatgcgtaagaaggcggatgggtccgtcgaagagtgcccgtccctggagcacatcatcaccatcgagaccggtggcttggacgaaatcaaggcctacggcaccacggtctcggacgaggagctggacgagcgcatcgattcggtcaagaagaccgacctgtgctccatcgtgtacacctccggttccacggccgcgccgaaaggcgtggagatgacccacgagcactactgccaaaccgcgctgaatctgccggcctacatgcccgatctgctgcacgacaagaggaacaccatcctgctgttcctgccgcaggcccattccttcgcccgcgccatcaactacatcgtcgtctcctcgaacgtccgcatctacatcgccaccggcatcaagacgctgatcagcgatctgcaggtggccaagcccactctcatgatcgtggtgccgcgcgtgctggagaaggtgtacaacgccgcgtcccagaaggccggccacggccccaagggcgtggtgttcgcctccgccgtggtggctgcgcagaactatatgaaggaagtctccgccaacggcaaggcaggtgcactgacccgcactcgccgcgctgccttcgatccgattgtctactcttcgctgcgcgaggtgctcggcggtcgcgccaagtggattgtggccggcggtgccccgcttgacccggaactgctggctttcttccgtggcgcgggtgtgcctgtatacgagggctatggtctaaccgagaccaccgcaccgtgcgcgttcaacccgctgggtacgccgttccacgctggttccgtgggcatcgcattccccggattctccctgcgtatcgccgaggacggcgaaattcaggtcaagggtcgtgctgtgttcccgcgctatcacaagaacgacgaggccactgagctgtcgttcaccgaagatggctggtatgccaccggcgacttgggccgtatcgacaacgacgggttcctgtacatcaccgggcgcaagaaggacctgatcatcactgccggcggcaagaacgtctcccccggcccaatcgaggaggtcatccagcgttgcgagatcgtctcccaggcgttggtgctgggcgacaaacgcccgtttatctccgccctggtgacgttggacgagaagtcgttgcgcccgtggctcgccgccaaggggcttgacgagaacatgtccctcgaggacgcggcaaggaacgccgccgtgcgcgccgaagtgcagcagtgggtcgatcgggccaacgagggagtctcccgcgccgaatccgtacgcaagttcatcatcctgcccgaggagttcacccaggagaacggtctgatgaccgcctccatgaaggtgattcgccccaaggtcatcaagcgctactccaccctcctcaacacccagatgtacaccaagaagaagtaaggaggactcgagtacagcaaaagggagattccattggaatctccctttgttataaccggccgaaggccgattcctagaagccgaggcgttctagttgcttggggtcggactgccagcctttggctaccttgacgtggaggtcgagcttggctttttggccgacgatgcggttgaccggggtgcgtagcttcttcttgacgtaggtgaggttcgaggcgcccttgccgatgatgatcggcttctgtgagtcacgctccacgtaaatggacacgttgacctgcgccttgccgtcatagccctgaccggtctcgttgtcttccggatagtcgatggaatcgaccaccacggccagcgaatgcggcagctcgtcgtccagggtctcaaggaacgcaccgcgcacgagttcggcgatggtgtcttccggacgctcctcgctgatctgatcgtccgggtacatctgcgggccctcgggcgtgtgctcaatgagcacgttcttcacttcagccagattgtcgtgcttcagggcgctcaccggcacgatgtccgagaaatcggcgaaatcgttgatttcgatgagcttgttgatgagttgctgacggccaagctcgtcgatcttggtgacgatggcaatcagcgggatgcgccacttgaacgtaccgtcctcacgcttggtggcgaagtcggtacgcagtcgggaaagaatacgcttgtcgccggggccgatttcctggtcggcgggcagcaggaaggccaccacgtccacatcggccaaggattcgtcgaccacgtcgttcagacgctggccaagcaacgtacgcgggcggtggataccgggcgtgtccacgagcacgagctgcgcgtggtcggcggtcaggatgccgcgaatcgccttacgggtggtttccgggcgagaggatgcgatggcgatctgcttgccgatcaacgcgttgatcaacgtggatttgccgacgttcgggcggcccaccacggccacgaatccggagcgatacggcacgtcctgcttggtcacattctccgtttcaccggtcgcgtcgacttcggcaacgccggcaacatcggaagcatcggtgacgtcaatgtcatcgacgtcgttcgtgctgttgttctggtcggtcatatcactccttgctggcggtatcatcgccttcgacgggctcgccgtcagtttcctcatgggtcctgctattttcctcgccgccctcgacgtgcgccggttcgacgacgatggtggacaccttcttgcggcgtccggcggagtccacggcggtcagtcgcagaccgcgcgtcacggccgaagcaccgacaatcggcacgcggcccagaatcttggtcagcaggccgtacacggtatcgacatcgtcctcatcaatgtcgatctcgaagatctcctccagatcggcaatcggcgtacgggcgggcatcttccacttgttgtcgccgattttctccggctcggtacgctgggtgcggtcgtgctcgtcttccagctcgccgacgatctgttcgatggcatcctcgatagtcaccatgccggcgatgccgccatactcatcgaccaccacggccacatgttggcgggaacgctgcatctcatggaacaggtcgtccaccggcttggattcgggaacaagcagcggctgccggacgatggattcgaccgtgcgctccatggccgccgggttgaaggcggtggcgcgcacggcgtccttcaaataggccacgccgatcaggtcatccacatcctcaccgatcaccggcacgcgggagaaaccggagcgggagaacagtttcagcgcggaagacagtgtggagtcgcgctccatgcagatcatatcggtgcgcggcaccatgatctcgcgagtcaacgtatcagacagggtgagcacgttgcgcaacatttcggagacttccggatcgaagtcgttggactccaccagtcggtcgatggcggccttgccctgctcgagctgaatcttctcaagctcctcgtcatcggacagatcggagtccttggagcgacggcccgaccccttggaaccggacttgtcgccaccgatgcgtgcgaacggcgtgagcttggtggccaacgacacgatgcgcgagttggaaatcatgatgtcgaccggcttggtcatgccggcggtgcgcgggcggaccagtacggagaccacggctacgataatcgcgaacaggaatccggcgagcagttcaacccacagttccgcaccccacagggatgcgatggaagacaccagtacgccgtcgagcacattgcaggcgatgcggaagaacgcacagctgccggcggtggcgtaacggtcggcgatgagccgttgcacgcgatgaatcttgtcgatcttcttcatcttgaggaactggcttgcttcggagtcggtctgcacctcgaggatgagattgttgaggctggctcgcgttacgcgggccacggcgccttcagcggcggccatggtcagcgaaagccagacgaacagggtcgccacaagtacgagaatgacggtgacggcgatcagcgtggtactggaatactccataatgttttttcggtgtccttgaatgtccttgaacggtatagaataatccgaatttggtgtgattgatttggaagtttatttggaatcgaggtcgcggccagcaccgtgcgcggcgtcgtacagggccagcgcgtcgggtgtgccggcgggcagcgtggcctgcacgttggcatcgtggcgcagggcgaagaaggtgagcagcagctgtcgctgcaggccgaacatctggcgctcctgctcgggggtcacgtggtcgtagccgagcaggtgcaggatgccgtggatggtgagcaatagcatctcctgcatggtgctgtgcccggctgcggcagcctgttgggcagcgacccacgggcagatgacgatgtcgccgagcactccttccatcacggttttgccgtcgcctgggcgcagctcgtccatcgggaagctcatcacgtcggtcgggccttcgaggttcatccaacgcatgtgcagttcggcgatgggatcgggatccacgaacatgatggtcaggtcggactgggtgctcacgcgcatctggtcgagtacccaaatacccaaatcggagaagaccttggggtcgatgacccactgggtttcattggtgacgtcaacgctcatcgtctgtctcactttggttggttgaatccgtttgctggcgggcatcgaagtcggtatggttgcggcggcccttgcgttcgatgtcgcggtggtcgccggcgatggcggagtgacggtcgtaggcggccacgatctggccgaccagctggtgacgtaccacgtcctcggttttgagatgcacgaatgcgatgtcgtcgatgccgcccaagatgcgttcgatggtggccagtcccgagcgcggcacggtcaggtccacctgcgagatatcgccggtgatgaccatcgtggagttgaagcccagacgggtcaggaacatcttcatctgctgttcggtggtgttctgagcctcgtcgaggatcacgaacgcgtcgttcagcgtacgaccgcgcatgtaagcgagcggcgccacttcgatggagccgtcttccatgtaccgcttgagctggtcggcgccgagcatgtcgccaagcgcgtcgtacagcgggcgcagatacgggtcaaccttgtcgttcagcgtgccgggcagaaagccgaggctttcgccggcctccacggccgggcgcgtgaggatgatgcggcgaatctgcttgtcctggaaggcacgcacagccttggccacggccagatacgtcttgccggtgcctgcgggaccaatgccgaaggtgatggtgtgcgattcgatggcgttcacgtaggccacttgtccggcggttttcgcacggaccggcacgccggcggcaaaggtgatgacgccgggaaccgtgggcttgcggtacgtcgggtcgtgggagccggcagaacgtgcatgggcgcgttcgtttgaggtcgattgcgccagtttgtcatgcaccgggccgtgacctggatgttcgaggcgcacgtggttcttgagcacgttctggtcgagcatgcgacgcacggtgtcggcgtccataggcgcggtgtaggcggcttggatgatggtgttgaccaaatcctcggcctgtgcggcctgggcttcggtctgcttggagcgggagacgatcgccacgcggttgccgcgcacgataatcgtcaggtccggaaaggcgcgctccacctcgcgaatgacctcgtcaaccgggccgagcacggcgacggggtcaagttggggcgggatggtgatggtacgtgtagtcgttgccacgaagcggatattcccctactactcgtcgagcttttcgccggtcatcacgtgcgcgtgcacgtggaagacggtctggccggcgtcgagaccggtgttgaacaccagtcggtaggcgccgtgaaattccttgtcggcgatgttctgcgcgatggagacgatgtgggccagctcggtcgggtcgtcggcggcaagttcggcgacgttggcgtagtgcttcttgggcaccacgagcacgtggaccttggccttggggttgatgtcgttgaatgcgtaggtcgtctcgtcctcgtagaccttgctgctgggaatctgccctgcgatgatcttgcagaacaggcaatcgtcggattcgctcatcatgctccttggtttgatgttgctacgcaccagcttagcgcgtgggcgttactcgtaacgtcccaacacccgagacaacagcgacaacgctacaggaccggccgtcgcggctctcagaatattgtgccccagtacgcagctcaccgctccggccttgacgaaatcagctacctcctgctcactgatgccgccctcaggcccgaccaccacactgacagtccgcggccggccgtcctggagcgtgcgttccaccaactgcgtaaccttctcctccacgccggaccacgtatcggtagcatcctgatgcagcacaatcaccacatcgccatgcacgcaggccctgcggcagatggccacgacctccttgctggacgcgcacgcctccagttgcggcttaaaagcgcgccgcgactgctcggtggcggcatccagtaccgaattccacttcttgtccgtacggccgaccttccacttggcaatggatcggtccgcctgccatggcaccacttggtcgacgccgatctgcgtagccatatcgatggcctgctcatcatggccggttttcgccaatgcctgaatcagcgccaaacgggtgagcggctcgggttcgcgccccacttccacaacttcagcaagtccggcttcaggatcggccatcactgcctggattctcaagccgttgccgtcggaaagttgcaggctgtcccccgccttgagtcgcatagcctgcacagcatggcgcttgatgtgcgcgggcagggttagcttccagccggcgtgaagttcgtcgctgttcaccgggacatcgtcgacctgcgggtcgaaaagaaaaagggcatcagtcatgacttcaaggctacacgcgacacgccgggcacacgcgcgaattgcatccctgtaatttcatgctaaactatttactcgttgtccaaacgacacctgcccgggtggcggaatggtagacgcgctagcttgaggtgctagtgcctattttatacgggcgtacgggttcaagtcccgtctcgggcacagataaaccccttgcattgcaaggggtttttcgttatctgcacacacgaaaggccaccaatgcagttcatcacgctggacaccgttgacgacccgcgcgtcgaagcgtatgtgagcctcaccgaaatgcagttgcgcaatcgcttggaaccagccaagggcgtgttcatcgccgagtcccccaaagtcatcgaccgcgcgctggccgctgaccgcgaaccgctgtcactgctggtcgaggaaccttggctggagggcatgaaagacactttcgacttcatcgacgggcgctggggcgcggatattcccgtctacgtggcctcacctgagcagctcaagcgtctgaccggctaccgtctgcatcgcggcgccctatgcgcgatgcgacgctggccgctgccctccgtagccgaggtctgcaggagcgcccgccgcgtggcagtaatggaaaacatcgtggaccacaccaatgtgggcgcactgatgcgttcggcggccgcgctcgatgtggatgccgtgctggtcacaccctcctgcggtgatccgctgtaccgacgagccgctcgtgtgtcgatgggcaccgtattccagattccgtggacccgtatcaccgggttcaacgacgacggtaccgaaaacaagcattactggccgttccagggcatcgacgagttgaagtcgctgggcttcaccaccgtggccatggcattggaggatcgttcgatttcgttggacgaactgacacgccgtctgcacgcgcctgacgaagatccgacgcatatcgacaagctcgcgctgatcttcggcaccgagggcgacggcctgtcccaccatacgattgcccgcgccgatttgaccgtgaagattccgatgagccacggcgtggatagtctgaacgtggcggcatccagcgcagtggcgttctacgcgacacgctaaggaatcgcacgcgctcctaaaaggccgaatccttaacaaatctacgaaactgttcatcgcaagttcacggcacgcgggggcgaaagccttgcatgttcgaatttttctgcaattattaactatgtaaaccgaatgcaaggaagcatccggcccagcagtgcggtgtcgaaagacgctcagtaacagagaggacagttacgatggccaagaatcccaagattctgtcgattgtgcttgcaggtggtgaggggacccgcctgatgccgttaacccgcgatcgcgcgaagcccgccgttcccttcggtggtgtgtatcgtctgatcgatttcccgttgagcaatctggtgaactccgggtaccgtcaggtcgtggtgctcacccagtacaagtctcactcgcttgaccgccacatctcccaggtctggcgtttctccccgctgcttggctcgtacgtctcccctgtgcccgcgcagcagcgtctcggcaagcactggtacctcggctccgccgacgccatctaccagaccatcaacatcatcgaggacgtccagccggacatcgtggtgatcgtgggcgccgatcacgtctaccgcatggacttcgagcagatggtacagcagcacatcgagtccggtgccgagttcaccgtggccggtatccgccagcccatcgaggaatcgaaccagttcggtgtaattgaggtcgatcccgatcacccgaacatgatcaggaacttccaggagaagccggccaccaccaccggtctgccggacaatccgaaccagattctggcttccatgggtaactacgttgccaacaccaaggccctgttcgaggctctggctctcgatgagaaggctgccgacaccaagcatgacatgggcggcgacatcgccccgtacttcgcttcccgcaacgaggccggcgtctacgacttcaactcgaacgagattccgggttccacggtcactgatcacgcttactggcgcgacgtcggtacgattaagcagttctacgatgcgcacatggatctgatcgcctatgtgcccgagttcaacctgtacaaccaggattggccgatttacacgatgtccggcaacctgccgccggccaagttcgtgcacgccggccgcgaccgtctgggccacgccaccgattcgatcgtctcccccggtgtgatcgtctccggcggtgaagtgcaccactccgtgctctcccccaatgtgcgtatccactcgtgggcacagatcgtcgattccgtgctgttcgacggtgtaatcatcaaccgccgcgcccgcgtgtacaaggcgattctcgacaagaacgtggtcctgaccgaaaactccactgtcggcatcgataccgagcacgatctggcccgtggcttcaccgtcacgccggacggcattacggttgtcccgaagaacaccatcgtcgatgactgattgaccagtccagacttggaaaagccccgcatcatgcggggcttttctcgtatagagctccctcatcagagggagcttactaagcgctatcagtactttggcatgttgtcgaagttgaagccaagggcggcgagctggtcgcggccttcgggcgtgatgcgctccatggtccagcgcgggtcccacgtccagtcgatgcggaactcctcgaccagaccggccagcgtggatgcgcattcgtcctcgataaggtcggtcagcgggcaggccggcgtggtcagcgtcatcgtaataatggcgcggcctagctcatcgatctcaatgccgtagaccagacccaaatcgatcacgtcgatgccaagctccggatcaatcacctgatgcagtgcctcgcgcacgtcttcggcagtggcgcggccgatatcgtcaatcgccttgatcggaatctcgctgccatcggactgttcgtcatcccggcaaccgcatttgccatggtgaccgccacacgcacaggtgtcatcgccggacgcagcagagtgctcgatcgggcgtccgttcgggaagcccttggccaaggccgggttggccatcacgcggcgagcggcctcctcgtcctgcaggacgccgttgacggcatcgaaaacggacggctgtggttcgggaaccaaattatcgttggacatatttcctcagttctttgcagcgagggctttggcgatggagtccttcagcccttcccagcctagcagagcgcatttgatgcgcatagggtatttcgacacgccttggaataccacggcgtcgccgagcttttcttccaggttctcgtcgtccagaccggcaccgcgcgattccatcagtttgtggaatgtctgttccagatccatggcctcgtccacggttttgccgtccaccagatcgaccatcaccgacaggctggcctgcgaaatggagcagccgtggccgtcccacaccaatcgcttgatggtgtgcggttcgtcatcggagacttcgacatggatggtcgcctcgtcgccgcaggtcgggttgaactggtgcgattcaccgggcgtgcagtattcgtggctggcttgcacggtgacattggccgccgcgtccgcggactgttcgaccgccgcgttgggcgcaaaggattccttgccatgcggatgttttgacgcctcgaggatgacctcttggtacatctgttcgaggtcatccccgctcataccgaattcgttcatggtgttctgttttactccactccaaagaacttacggatgcccttggccgcttcgaccaatgcttgggcatcttcgaccgaattgtagacaccggaggaggcacggttggatgcgtataggccgaagtggcggtgcaccggctgggcgcagtggtgtcccacgcgaatcgcgatgccctgggcgtcgatgaactggcccacatcgtgcgggtgcacgccggccacgtcgaacgccacggtaccgatgcggtccacgttttcgcgcggtccgaggatgcgaatgccatcgatgtcgccgagcttcagcagttcggcggcgatggtcttctcatgggcctcgatgttctcgagcccgatgttcatcatccattcggcggcgacgcctgcggccaccacttgggcgaccggctgggtgccggcctcgaagcgggccggaggggccatgtattgggcctcgtggtccatgtaggcgagttcgaccatggagccgccgaagttggccggcggcagggcttcgagcagttcgcgcttaccgtacaggaaaccgacgccggtaggaccgtacatcttgtgcgcgctccaggcagcgaagtccacatcaagcgcatggaaatcgactttgaggtgcggtacggactggcaagcgtccaagatgaagatcgaacctacttcatgcgcacgcttgatgataggggcgatgttggtgatggcacccgtggtgttgcccacgtgggtgacggccacgaccttggtgcgttcggtgatgacttcgtcgaggttgtccgtacgcacacggccgtcctcggtcaggtcgatccacttgaaggtggcaccggtacggtaggccagctcctggaatggcagcagcactgaatgatgttccgcacgcgagacgacgatctcatcgcccggcttcagggcaaaacgcttggcggcttctcccccacggcccagcgacgcattgccgaatgcggtggcgagcaggttcagtccggccgtggcaccaccggtgacgacgatctcttcttcgccttccgctgcattcgcgccgaccagcttggcgaccttggcacgggcctcttcgaaagccatggtactacgggccgccagctcgtgggcaccgcggtgcacgccggcgttgatcgtacggtagaagttcgcctcggcgttgatcaccgcattcggcttctgcgaggtggccgcagaatccaggtacacgagcggatgcccgtgaatctcctgattcagaatcgggaactcgccccgaatctccttaaaatcaaccattatgttcccctacttacgtaacaattgtacgaaacgagtgggagtcggacatggcctgttcgcggctgtaaagacttggcctgagcggcccggaacgtgtcgagaatagggcatgtcagactcccacggtcacggtctcaggccagcgcggactcggaatcagcaccctcgggcaggtactggtcgtagccgttctcttcgagttcgtcggccagctcagggccgccggtcttgacgaagtggccgtcggcgaacacgtgcacgatgtccggcttgatgtacttcaagatacgggtgtagtgcgtgaccatgaggatgccgaactggttggcttccttggcacggttcacgccttcggacacgatgcgcagggcgtccacgtccaagccggagtcggtttcgtcaaggatggcaaacttcggcttcagcagttcgagctgcagcacttcggcgcgcttcttttcaccgccggagaagccttcgttcacggaacgggaggcgaacttcgggtccatcttgaggcgcttcatggctgcggacaggtccttggcccactggcgaataccgggagcctcgccgtcgatttcggtcttggcggtgcgcaagaagttggtcatggacacgcccggtacttcgaccgggtattgcatggccaggaacaggccggccttggcgcgctcgtccggagtcatcttgaggatgtccttgccgtcgaggagggcctcgccggagtcgaccacgtacttggggtggccggccaacgtgtaggcgagagtggacttgccggaaccgttggggcccatgatggcgtgggtttcgccggagtggacggtcagggtggcacccttcaggatcggcttgatgccttccttggtttcgacgtggacgtgcaggtccttgatttcgagtgttgacattgttgtgctcctaaaaatgctgttcttacttgtcttcgaggacctgtgccatggcgtcgttttcgccacgggccagtcggcggtcaatcacggtcatcagatgttcggagatggcaggaatgccgatctcctcgacgagttcgccgaagaagccgcgcaccacaagcttgcgggcgtcggtttcggggatgccgcgggattcgaggtagaacagttcctcgtcgtcgaagcggcccaccgaagaggcgtgaccggcaccgatgatgttgccgttttcgatttcgaggttcggctcggaatcggcgatggcacccggggtcaggaccaggttgcggttgagctcgtaggagtcggtgccgggggcggtgggctggatgagcgcgttgcccacccaagtggagtgcgcgcccttgccgtcaagcgcgcccttgtagaccacgcgggacttgcagtcggggtggttgtgtaccaccatcgtgcggtgttcgatgtgctcgccggggtccacgaagtagatgccgagcatgttgaggtcgccttgttcgccgccgaagtcctgatccatgcggatgcggacgatgtcgccgcccaaggtcacgacggagtggcgcagggatgcgccttcgccgacgtggatgcggtggttggccacatgcttggcggttttggcccattcctgaacgaacgtggtggagacgtgcgagtccttgccggtggtgatttccacgccttcggccagtcgtgcgtcaccgtcgtgttccacgacgacgtccgcatgagccttgtcggcggcggcgatcaccagatggaaagcgtcgaggtcctcccccgcgccgtgcactttgacgagcacgggctgggcgatctcaccggacagttccagaatggttgcggtgtggccggattcccattcgactgcggagacgcggtcgttgggcttggacacagtgccggacaggccctcaccgagcttgatctggctgagcttcacgccttcggccaacggcgagccgtcaatcatggagacttcgatctgcgtttcgccggaaggcttgaacacggtgaagaactcgttgatgcgctcgataggcgtgtagcgccattcgtcctgcttgcggctgggctccgggtagtcgcctgcgttgaacgagcgcacggcatggtccacggaggacggcatggcagccggaatcgcgtacgggtcgttggggtcggcgaccggaatcttgatttccttgacgggtgttgtgttgtcggtcatcggaatcagcccaccgatccttccatctgaagttccacaagtctgttgagttcaagcgcgtattccatcggcagctcgcggctgatcggttcgacgaagccgcgcacgatcatgcctcgcgcctcttcctccgtgagtccacggctcatcaggtagaagagctggtcttcggaaatcttggaaacggtggcttcgtgggccatcgaaacgtcgtcttcgcgaacgtcgacgtgcgggtaggtatcggagcgggagaagtcgtcgatcagcagggcatcgcacacggtcgagttggacgaaccgtacgcgcccttgacgattttgaccagaccgcggtaggcggagcggccgccgccgcgcgagatggacttggcgacgatggtggagctggtgtgcggtgccaagtgaatcatcttcgcgcccgtgtcctggtactggcccttgccggcgaagccgagggacatggtggatgccttggcgtacggttcggcgaggatgcaggccgggtacttcatggtggccttggaaccgatgttgccgtccacccactccatcgtgccgccctcacgcacgtaggcacgctgggtgacgaggttgtagacgttgttcgaccagttctgcacggtggtgtagcgcacgcgggcgtgcttctcgacgatgatctcgacgatggcggcgtgcagcgagtcctcggaccagatcggggcggtgcagccttccacgtagtgcacgtaggagccttcgtccgcgatgatcagcgtacgttcgaactgacccatggccggggtgttgatgcggaagtatgcctgcaacgggatgtccacgtgcacgcccttcggcacgtatacgaacgagccgccggaccatgccgcggtgttgagggcgccgaacttgttgtcctccgggggcacgacggtgccgaagtacttcttgacgagttcagggtattcgcgcacagcggtgtccgtgtcgacgaagatcacaccctgcttcttcaggtcctcacgaatggagttgtagattacctcggactcgtactgggcagccacgccggagacgaggcggttcttctccgcctccgggatgccaaggcgatcgtaggtgttgcggatgtcgtccggcagctcctcccacgacttcgcctgcttctcgatcggcttgacgtagtacttgaagtcgtcggcgttgaagccggagagatccacaccccaatcgggcatgggcttttcgaggaacgccttgaatccacgcagacgcatgtcgagcatccactgcggctcgcctttgtcggcgctgatcgcgcgtacgacgttctcatcaatgcctcgttttgcggcttcgccggcggcatcagaatcatgccaaccatagttgtagtcgccgaactggctgatgatctcgtcatccttcttgatcttgtcctcgttgacgcgggtacgatcagccacatactggctcatctccacgtcagcggcggcgtttggtgctgtgttttcggtcaccatcctgccttccttgtatcacacttaaccctatgaaaacctagcagaacccaagtgcaaacactagctgccctgacgcatattggctgtggtcttgattacatgcgggcgccatcgggccatgcggcatcacggatggcgccaaacggcgaaggcgtggcggcgaagcatcctgagatgccgtgccgtcacgccttcatcgtgcgcggaccgaccgcgcgggatccacggtcagcgggccgcctgatggccgagcgccgccttgaccagaccggcgaacagcggatgcggcttggtcgggcgggacttgaactccgggtgagcttgggtggccacatagaacgggtgcacgtcctgcggcagttccacgaactcggtgagctcgccatccgggctctggccagagatgcgcaggccgccttcgcgcagacgatccttgtacgccacgttgacttcgtaacggtggcggtgacgctcggtgacatgcgtggtgccgtacagttcggcgaccagcgagccttcctccagctcagccgggtaggatccaagacgcatggtgtggcccatgtcgcccttgccggccacgatgtccttctgctcttccatggtggcgatcaccgggttggcgcaatcgggctcgaactcggaagagttcgcgtcttcaatgcccagcacgtggcgggagtattcgatgaccatggactgcaggcccaggcacaggccaagggcgggcagcttggtttcacgggcgaacttcagggcgccgatcttgccatcgatgccgcggatgccaaagccgccggggatcacgatgccgtcgacgttgtcgagagcggcggccgcaccttcggtggtttcgcaacggtcggccgcaacccacttgacgttgaccttggcccagttggcaaagcctccggccttgatggcctcggtgacagacaggtaggcgtccggcagatcgatgtacttgccgacgatggcgatgttgacctcgtgcttggggtggtggacgcgctcaagcaggtctgcccattcatcccaatcgacatcgtggaacggcaggccgagctcacgcaccacgtaagcatcaaggccctcttcgaacagaatcttcggcacatcgtagatgctcggcgcatccacgcagttgaccacgccttcggcatcgacgtcgcacatcagggaaatcttgtctttgatggactggttgagcgggcggtcggaacgcagcacgagggcgtccggggagatgccgagctgacgcagcatcatcacggagtgctgggtgggcttggtcttgagctcgtgggcggcggaaatgtacggcaccagggaaacgtgcacgaacatgcagttgtccgggccgagatcgcggcgcacttcgcgggcggcctcaaggaagggctgggactcgatgtcgccgacagtaccaccgatctcggtgatgatcacatccacgtcatcggaagcctgggcgcgcatacgagacttgatttcgttggtgatgtgcgggatgacctgcacgcactggccgaggtattcgccggcgcgctccttgcgcagcacttcctgatagatctgaccggtggtgacgttggccttctggctcaggaagacgtcgaggaaacgctcgtagtggccgatgtcgagatcggtttcggcaccgtcttcggtcacgtagacctcaccatgctggaacgggttcatggtgcccgggtcgacgttgatgtacggatcgagcttttgctgcagaacatggataccgcggctgcgcagcaaacgaccgagcgaagatgcggtcaggcccttgccgagagaggaaacaacgccgccagtgacgaaaatatgcttggtgacgtgctcttgagaattaccatgtgttcttctaaccatggaattccactctatcatccgtgtatgacccggcgtgttcatgacgtggccggtgtagtcgcgcgtaggcggcccgtctcgtcctgccttggccagcatatggtcgaatacacggcgcacttcgggtccatagggcgcaccaggacgaggattctggtccgattcgtcggaacaggaatcccgggctcaacgtcgactgatacccgggattggctggagggcttggttctattcgctcagcaagtgcgccacagcatcgagcgcgagcttgtagccgtagaaacccatgccggtgatggtgccggtggccacagggctgattacggaacgcttgcggaactcgtcgcgggcggacgggttggaaatatggacttccataagtggcaggttctcatcaatgaccatgtgcgcggcgtcggcgagagcatacgaatagtgcgtgaaggcggcggggttcatgaccaccggggttttctcgtcggcggcttggtgcatccagcgcaccatttcggcttcgtcgtcggtctgacgcacctcgacttcgaggccgaggtccttgccccattcggcgcagagcttgcgcagggtgtcgaggtcttgacgaccgtagacgtcgggctggcggacgccgagacgtccgaggttagggccattgacaacgatgactttggtcatcgggactccttttgtttgtgcttctctccctccgccccttcggggcacctccctcatcagagggaggaagaaggtagatccgactccggggcacctccgttagaggggagccaagtacttttttctgaggggatggcgaacggcacggcctgtggccgttcaattattgctggatacgatggaaggcttcttctacggcgtcggcgggcgggttgtcgaggtgtacgacgtgaccaatctcgtcaaggaccacgaaacgcagttcgttgccacgggctttcttgtcgcgatgcatcaatgcgagcacgtcgtcgaacgagccgccatgccacgacgtcggcagacccagcgaagcgagcaacgagcggtgatagtcaaccagatcctgatcgatgtaaccgatcagatgggccagctcggcggcatacaccataccgacggccaccgcattgccatgcctccagcggaagtgctcgagcttttcgatggcatggcccatcgtgtgcccgtagttgaggaattcacgaagacccttctccttcaaatcggaggagacgtggtagaccttgacctttaccgtgcgctcaatgagctcggcaaccacgtcttcgagcggcgagccgaggaatgtagagccgtcgaaagcgcgcagttcagctgcgtggtcttcgaggatatgcaggatttcgggatcgcggatgaaaccggatttggcgacttcgccgagaccctcgatgaagatgtcattgggtagcgtagccagcgtcttggtgtcggccagcacaccggcaggcgtgtagaacgagccgacgaggttcttgccctgcggggtgttgatgccggttttgccaccggtggaggcatcgaccatggccagcagcgaggtcgggcagtttacatagcgcacgccgcgcatccacgtggcagccacaaaaccggccaaatcggttgcggcaccgccgccaagccccaccacggcatcggatcgggtgaaaccttcgttgccaaggcgttcccaaatgccgttggccacggtaatggtcttgccgggttcggcatccggaatcacgatgtcggaaacctcatagccgccctgacgcaacagagcgcgggcacgatcggagtgtcgctgcaccgactgagtgtggataagcgcgattttggcgggtttgggtcccagcacgtcggccagatggttcatggcaccttcgccaatgaccacatcatacggctcaattgccgctccggtaacatgcactgctcgctcagataccatatcaatcactttcttcgctgcgccctgaggcgtaagcccccgggtatggacatgaacgttggcgacctcgcggaatactgggtcacgctgcttgaacagttttttccaacgggagttggcgttgccattgagcatgggccggcctcccccacggttcgcgcgttccatggcttccgccggatcggcatcaaggtagaccacacgaccgccatggtcgatgtaggaggcgagggcatgctgggtggatggcgtcatgggagcgccaccgcccagcgaaaagataccgtcgaaatcctcaagcatatcggcgatgagatcggcctcgacctcgcggaatgccggctcaccgtattcctcgaagtaggagggaatcttcatgcccacttcacgttcgatctccacatcggcatcggcgaacggcagacgcaacatatgcgccacttccttaccgacacgtgttttgccggctcccatcatgccgatgatgacggcgcgggggcgtgcggtcataatctacgaatcctctcgacgattggtgggtacagttgctgatggttccgcggcagtcgtcacgaaaccatacgcccttcgttcagcgcatgtgctccggccacgaggcgagatacgactcaacgttgcgccgtgtttcggcaacactgtctccaccgaacttatccagcgcgtacttcgccaaagtcagacgcaccatggcctcggccaccacggatgccgcaggcacggcggtgttgtcggaacgctggttgatggcttgtgcggattcgccggtcagcacgtcgaccgtacgcagggccttggggatggacggaatcggcttcatggcaccgcgtacgcgaatcacctggccattggacataccgccttcaatgccgcctgcgcggttggacagacggtcgatgcggccgtcggcgttgaccacgatctcatcgtgcgcctgcgaaccggggcgggaggcttccaggaagccgtcgccgatctccacacccttgaacgcctgaatgcccataatcgcggaggccagagccgcgtccagtcggcggtcggactccacatacgtgccgatgccggcaggcacaccgtaagccagcacttcaatcacgccgcccaacgtatcagcggccttcttggcttcattgatgcgttcgatgatacggacctcggcctctttatccaacgtacgcacgggagaggcatccaacgcttccagatcgtcaggtgtgggcaacggcaaatcagggttggtctgcacgccaccgagcgccaccacgtgggctacggtgcggatgccgaacgcctgatccaggaactgcttggccacctcgcccaaggccacacgggaggcggtctcacgggcgctggagcgctccagtaccgggcgggcgtcgtcaaaaccatacttgcgcatgccggtcagatcggcgtggcccgggcgcgggcgactcagcggcgcattgcggccttcgcgcggcaggtcatggtcgagtgcatcggcgctcatgacctcggtccacttcggccattcggtgttggcgatttcgatggccaccggcgagccgagggtcaggccgtggcgtacaccggtcagcagacggaccttgtcttgctcgaacttcatgcgggcaccgcgaccatatccaagtcgacggcgtgccagtgcggaaacgatatcgtccgtgctaatacgcacgccggccggcaacccttcaatcatggccaccaatgcttctccgtgcgactcccctgccgtctgccaacgcagcataacttccctcgtttcatgtgtgtacgtctatgagtacgtctaactaggggttaatgttaagctatgccatacctgttcacgctacccggtctgctatgtgggcttacactgtccattgaggatgttcgtcatcggcgggtgccgatcgcatgggtggccgtgggcgcgttaatccagttggccgccgatttcgcgtatggagtggtggcgaacgacctgttcgtgctgttgcaggcactgttgttcaccgtgctatgttgcctgatccagttcgcgttggcgttgctggtgccgcggtcattgggattcggcgatgtgaccgccttgatacctatgggattgtctgtcggactgtttggcctgttgcctgtggtggtctggtggctggcgatgggcgttgccggcatcacatggattgccttgtggacgcgattcgacccacaacgcacatcaccggcacatgcgggcaaggtgccgtatgtgccggtgatattggcgggcgcgattgtggcggtggtggttggggtgttgtcctagatttctcctccatccgctttgcgggagccccgggcttaagtcgagcgttacattccccgcagtgctcccctcagcgagggagccaatgaagagactaatatccgatcagcttccccaagcgaaggaagctaacgggatgactactggttttcggcttgccacttgcgtagttcggccacgttctggtcatgttcatcggcggttgcggcgaacttggtttcgccggtgtccagattgaccgtgcagaagtacagccaattgccgctttcggggtgcagtgccgcttgaatggcactatcgccgggattgctgatcggcgtaggtggcaggccggagatcttgtacgtgttgtacgggttggactcgtcctgggtcatctcggtggtcacctgcgcgggcttgacgttattgccataggccacggtggaatccatgcccaacgacatgccctgctccaaacggttctcgatgactcgcgtcactttgccgtagtaatcggctttgttgacctcggcctcggcgatagaggcgatgatcatcacccgttcgcggtcactgccggtcggcacgcccaattcatccaacttggcgatacgcttatcgaccatggccttgaggatttccgaagcgctcttcatgctcttgacgttgtaggttcccggctccagccatccctcaaagctaccgcccgcttcattgggcagaatatccttacccttgttcttgataatcgtgtcgaattcgctttgggaaatgccggaaagcttcgcggcgtcggcgaacacatcggtggcacgttcaccgggatgaacctcaaggaagcccgccgcctggttggtgtcggagagaacggcgatcacatcggatgcggccatatgcttcttcaatgtgaacgttccaggatagagtgtcgagctattggcgttgaccacgctggtgaacgcggcagtggacttgatgacttcggccttgagcagattatcggcgatctccgcagcgccttggccctcgctcacggtgaattcgacctcgccatagcccggtcccggatagtctgcgatggccgtcgactggttgctccggctgtcgcgccatgcgatgagcttggttacgccgaaatagccgccgccgataagcagggcgacgatggcgatagcgatgataatgccactgatacgcttgcgcttgcgatgtgcacgtcgcttgcgcatctccttgcgggatttcggcggttctggcggcgtggccccgcgcattggttctgactcctgttcgacccaatgcgtgttgtcatcaaagaactcgttaaaatcatcggtcataaccgatacctcactactcccgggtacggtcgagtgccgtctgcaaaatcaccactgccgactgctggtcaaccaccggcctgtgcttgttcgaagctttatgggcctcgaacagttgacgatgcgcactgactgttgttaatctctcatctatcaatgacacctgcggaatctgatactccgtagaatcactgtcttcactctctgcttgcagcctcttctccagattggccgcccacctgcgcgcttttttggcgcttttgccttctgtaccgtccatctgcaggggcaatccgacgattacatggtccacatgttcgtcttcgatgacgttcaggacctcgtcaatagcaaagaaatagtcgccggcaacatgaatgttgccagcagggtgtgcaaaggtaagctccgggtcggacagtgccagtccgacccgggcattacccaaatcaacgcctaaccacaccactggcggaatcaggctttctgcgcctcgtgcttgagcgcttcgagggcctcgccgatcttggaggcatcgacaccgccaccctgggcgaagtccggcttgccgccgccaccgccgccgaggaccttggctgcgccacgcaccagatcaccggccttgatgccggccttgcgggcggcctcgttggtggccacggcgaccatcggcttgtcatcctcgttcacgccggcgagggccaccaccacgggggcatcttcaccgagttgtgcgcgcacgtcgagcacggtcttgcgcagggcgtcgaccgcgccgaagtggcccacgttcttgacagccaccttgaccggggccgcggagttcttggtgtcagcaaccagcgccggaaccgaggcggccagctgggactcgtacatggaggccaagcgacgatcggattccttgagcttggcgagcagggcgttcacacgctcggcgagctcgtccgggcgagcgttgagcttgtcggacagctgggagaccaacgcgtgctcacgagcgttgaagtcataggcaccctggcccacgacggcgtcgacacgacgcacgccggagccgatggaggcttcggacaggatgttgaccatgccgatcttaccgacgtggtccacgtgggtaccaccacacagctcgcggctccagccgtcttcgccgatggagaccacgcgtacgatgtcgccgtacttctcgccgaacaggtgcatggcaccgagggcgatggcgtcgtcgaacttcatttccttggtggtcacggcgaggttgtcgcgcagcttgtcgttgacgcgctcctcgactgcggagatcacggacttggccggggccttggaccactggaagtcgaagcgcagacggttcggggcgtcctcggagccgcgctgggtggcctgcgggccgagctcctcacgcagcgccttgtgcaccatgtgcgtggcggtgtgcgagcgggcgatggcgccacggcgggccaggtcgatgttggcgttgacttcggcgccgacgaccagcgtgccttcggtcagacggcactggtggacgatgaggtccttgatgggcttctgcacgtcgtcgacttcgagcactgcaccgtcgtcggacaggatctcgccctgatcggcaagctggccgccggcctccgcatagaacggggtacggtcgagaatgacttcgacgttggccgggccggtgacggcgggcacggagcccttgccttcctgcatgatgccgatgaccttggcacgggcggacatgtccgtgtagccgaggaagtcgatcggcttggcgagcgtcttcttgaagtcgtcatagaccgacaggtccacgttgtgacgcttcttgagggcgtcggcgcgggcacgggacttctgctcggccataagctcgcggaacttggcctcgtccaccttcacgccctgatcggcggccatttcgagggtcagctcaatcgggaagccgtaagtgtcgtgcagagtgaacgcatcagagccggagaccaccgggtcggcggtcttcttggccttcttgacagccacgtcgagaatctcgatgccgttctccagcgtacgacggaacgcatcttcctcgccgtaggccgcttcggagacatcgtggaaggtgtcgttaagctccgggtagctggcgaccatggcctccttggagacaggcagcagctcgggaatcaccggatcggtcacaccgagtacacgcatggcctgcacggtgcgacgcagcaggcgacgcagcacgtagccgcggccgacgttggacgggcgcacgccatcggacataatcatcagcgcggaacgcacgtgatcggccacgacacggaacttgacatccgcggcctcgtcctcgccgtacttgcggccggacaagcgctcggcggcctcgatgaccgggaagacctcatcggtctcgtagatgttctgcttgccctgcatcaggtaggccaagcgttccagaccggcaccggtatcgatgttcttctgggcaagctcgccgacgatgtgcaggtcggtcttggacttgacgttgtcgacctcgtagttctcgaacacgaggtcccagatctcgatgaagcgcgtctcatcggccgcgggaccgccatcacgaccgtattcggggccgcggtccacgtagatctcggagcaggggccaccagggccagggccaccggtggtccagaagttgtcttccatgccgaaaatctgcatgtgctcgggatcgaagccctcgttcttccagatggaacgggcctcttcatcgtcggtaaaggtggtgacccacagcttttccgggtcaaagccgtaaccgccctcgctctgcggggtggtcagcagctcccaggcgtagtggatggcctcttccttgaagtagtcgccgatggagaagttgccaagcatctggaagaaggtgccatggcgggtggtcttgccgacctcatcgatatccagcgtacgcacgcacttctggttcgatgtcatgcggcgcttcggcggggtctgctcaccaagaaggtagggaatgaacggcaccatgccggcgatggtgaacagcgtggtggggttcggggaaatcagggatgccgaaggcatgacgagatgatcatgtttggcaaagtaatcgaggtatcgctttgcgatgtccgcagtgcgcatgagcggatgaactccttgtttgggtaatgggcgcagtcgcgcctggtattggtggaaaaagactggattatgaggactagtttgttctagctggttcagtgactagatggcaaggcggcatgcgcgtgtcagttggcgcgctcgatgtactgacggttgagctcagcctcgcgggctcgacgggtggcattgaactcgttgaccaacccttcgagtgttttcatcggcacattgtcctgatcggggccaagcaggaactggcgtgccgcatcaggcgtattggccttgacataggcctgtgccttggtgacggcaacgattccgatggccacgccgacgccgacccagaagatgcgtttgaacatcactcccccttctcggcggtgtcgttgacggtggttttcgcggcgttcttcgcaaggaaggactgccccgtagttttcagcgcgtagaaggtggaagcaatcttgatgatgggcttaccgaggaaggagccatacaaatcggtcaacgcaccaacgttgttggcggtggtggaagccgcggcggaaatcttgttcacgtcttcaagcgacttgttgacctgcttgacggtggtcacgccttcgtccagcgcggggatggcgtgttcaccggactcccggaccgtctgcgatatctgatcaaacatcttgcccagcctgatcagcggatagatcatgaaaccggccaatactgcgaacgcgatggccgcgatcaggccagcgatctctccgacttccattgttgcctccttgaggtcacacttactcggataagggtagcactcctcccctatttacccgtgcaactgacgatgaaatacgctatttgccgtatgagacgatggtcacggcctgcgaaaacggtttggtcgtgtcgaagtcgagtacggttaccgagccgttggccggtcgttcgctaaggtcaagatcggggcctccgaaacggtggccgaggctgagcagcgtgttaccgtgcgaaatctgaagcacatcatcgccatccttgagattggggttgctggcgatgagctggaatgctccttcgacgcgcgtccagtattcttcatcggattccgcgtcatggaaggggtcggcctctttcaggaaatcacgggaggcggccagaccaaatttggctacgatgtcgtagtagtccttcgcgccgtgaggtccacccgcagcggtccaagccagcgacatgtcctgaccctcgaagtatccgtagcattgttcgcggaaatgcatatcggccgtgagttctggccgtgcatgtccggcagcctcattgatatcgagaattcgcttcgctgtgatttcggcgcgagaagtatcggaacaatatgccgccgcaaaatcatagccctcaagtttgtgcccggccctgtcggcatcggcaagtccggatgcggtaagcggcgcattgcaccatccctgaagacggttgtatttattgaacgtggtttgcccatgacgaaccagatgcaaatgcagaatcatggttcccatgctaccgcagtccgctaaaacgcaggcccgtcgccccctccatggcacgcgaaccgcaggagaccgtcgacgaaaccgacaacaggcccatgcgagtgctcggctaccgcacccccgccgaggcattcgccgacgaactgccagaatcagccgcgaacaaggatgttgcacttacaaatagataacgggggccccagctgacatgactgatttgaggtatgatatacgtatgtcataccactgttataaggagtaatgatggctatcaaggagaaggccacgatcagtctggatgcgcagaccaagcgtgacggcatcgccatactggacgccatggggttgaacctgagcacgtttgccgaaatgtctctcagacaattggtacgcgacgggcgtctgccattcacgccaagcgtccgcccttcattcgaaaaagacaacgagggatatcccctgttcaaagcgaacatggatgatccccgcatcgtgacgccccagatacgtgatggtgccgtgatcctgccggagggttgggacgatgatgaagactgatccgcgccagttcgagatatggtgggtgccgttcgcttttcccgacaagccaggcaaagcgaagaaccgtcccagcgtgatcctccaatgggacgacggcacccgcatcgccttggtgaccaaggtcaccggcaacacctggcgcgacgaaccgggctatgtggtgctgcgtgactggcaggacgcgggactgagcaagcccagcgccgtgcgatgctcgcaactgctgcggctgccaagcaatcttttcctcgacgacggcccgacaggaagactttcggcatatgatgccggccgcgtcgcctgggcgatcaacgaactctatccgggcctactagcctgagagcaaccgataccgtcaccatccctgtcgaggtgcttgccgcagcacgggtcaccgacgtcactcttgtcaagtttggcgtgatgggctgttgtcgcgggcgaatcgttccccgataaccgctaatgcagtccgaaccagccgctgcctcctgcctcccgataaaaatgaattcgtcaaattctttcgggcagcgaatgcagatacatgtatagagcatctgtactattttcaagaatgctcattgtctgcggcaacggttcggcatacacagttttataatccacctcatcgtactctttccgaatggggaaagccaaacgttcatcgtcaacagaaaagtctgcttgtacaccctctttattccctcttgcatctacacgaatccatcggtcaatggatctcagataagtggcattcaaggcatggatgcagtatccgctttcaggcgtactgcctaacgtaagcctttgatagcatattccggcaggaatgccatttgctcttaatagggcggccaataaattagattttgcccaacaaataccgacgccctcccttaatgcgtctgaggctgttgccgtgactcttttgtcttggacatcccatgaatgcttgatttcatctctaacaaaatagtaggcggcttttgccagttcgatttcgccttcagtggagtcttttagttccttggcttgtctttgcacactcggttcattccaatcgatatagtgcgaaaaggcaaggtagctactgatatcatcttgaatatccaacatataacacctccgagaatcccgattcgtcgctctcttactttattaccccgttgcgaagttggttgtttcagcaagtccgacatagcggcttctcaccaagctatctcattttcgtgcagaccgatctgccaaaacaacgacgaccagattggccagcaccatgacaacaagcgtggccaccaacgcaatcaatgcctccgatgccatgttattgaagctcttctccatggccccgccaatgatgatttcaagggcgatgaggaacagggcacatgcatcaacgaggaatatcggagcgtactgcttgtgaatccgattccatgtgtcttcggatgacattgttgccggcgttttgatgcctaccgaattctgcaaaggcaacgttccgttctttgcatcacgatagaccccgaccaaaaacacgccgacgaccacggccacaactacttcgacgataagcatgcgtcaaggacatctcccccctagactagtaatggtttgaatcccgtctgcccaccgatggcaggtcgattacgcgaggtgaccatatggctccagtggagcgtcatatcgaggaagcgctgtatcgcagtgccgtggaactgatcgagcgaaggtatccgacaggatggggaggcgcggcggcgatgcgactcgccggcaaagacaacggtaaacatgacggaagcaacggctcggaggcacttatcgtcacgagcgtggcgattgagacacccaatgccgccgcttcgctatgcatcgaggtcggagcgatgtgcgaggcgatgaagcttgatcgccgtgtcacccacaccatctgcgtcgtacgcgatgacgaacacgccccgttcaccgtgttgtctccatgcggcatctgtcaggaacggctgcgctattggggcgacgacgtgatgtgcgccgtttcagacaacaatcagggagagcatccgttgttcgtgccgctgcgcgacctgcagccgcaccattggactcaggtgtatccactcgccgaattggaacactacgagcgataagccgccctcgattgaaatccctacctccctaagctatgcagtaggctccgcccgcaagtcacactggtacaattttcaggtttgagactgtagcaagttgagtcgctttatcagtaagtctgtatttggaggtatcgatggcccatcgtccgcttatcggcgtggtcccgttgtgggacgacaaattgaacagcctgtggatgctgcccggctatttcgacggcatcatcgaagccggcggcatcccggtgatgctgccgctgaccgacgacgagaccacaatcggacagttggtcggccaatgcgatgggttcctggtcaccggcggccacgacgtggatccagaacggtatggcgaggcggccggccccaagacggtcaaactatgcaaggcccgcgaccggatggaggagcgcctgatcccctccgtcatcgcggcggacaagccattgctgggcatctgccgcggcatccagagcctcaacgtcgctttgggtggcacgctgtggcaggatctgccggacgaacatcccagcccggtcgcgcatcatggcgacaagccgccgtatgacccggtggcccacgaagtgtcgatcgcgcccgattcgccgttggcccgtgcgttgtggccgctgggagacaacggcccgagtgagacggaggccgatgaggtcgattccttcggcaggccgtatcatccgcgcgcctatacgctgggcgtcaacagctatcaccatcaggcgattcgcacgctgggccagggactggaaccgatggccaccgcgccggacggcatcgtggaggcggtctggatgccggccaaacgtttcgtctgggccgtccaatggcatcctgagttctcccaccgagccgatagcaaccaacgtcgcatcttcagcgccttcatcgacgcctgctgacgcaagctttccgccgatctcgacgaaacgccttccaggaagcagaacggcgtgattccgttcatctagtctccgggaaaacgcccgcgccccggaacgcgagaaccccgcgtcccttgcgggagcggggtccaagcggtatgtccttgattctgatgttccagataagggggcccgaatcagcgggcgtagaattcgaccacgtactggatgttgacctgcaccgggatctcttcgacctccggcttacgggtcacagtggccttcagggacggcaggttcacgtcgaggtagccggggaccgcaggcagcacgtcacggtgcacgccttcggcggcgatctggaacggaaccatggtctggctcttggccttcacctgaatggtctggccgggcttgacgcggtaggacgggcggtccacgatgttgccgtcaacgaggatgtgacggtgcaccacgaactgacgggcctgggcggtggtgcgggcgaagccggcacgcagcaccaggttgtcgagacgggtctcgaggtcggtcagcatggcgttaccggtctggccggcagtacgggtggccttctcgtaagcggcgcgaagctgcttctcggagatgccgtactgagcgcgcagacgctgcttttcgcgcatacgcaccgcgtaatcggactcggtgcggcggcggtcacggccgtgctcgccaggagcgtacggacgcttttcgaagatgcgctgagccttgggggtcagtgcgatgccgagggcgcgagacagacgcacctgacggcgagaacgctgaacgttcgtcattggattaatccttctgtcgttatctgaacggaacgcttgccttgcatatgcctggcaagcgctgagccgggcctccccagcgcttcgtcgtgaacgaacacgaacgggttggttttcttgcgatcacctaccgccgacccgctgatgggctatgactccagacggtatctacctgttggcagacaccagcagaccatattacaccgaggctatggacagcactccggcgtccatgcgatacacccggtctgcgtattcaagtgcatcgggatcatgggtgaccatgagaatcgccgtgccgttgttggcttggtctctgagcagacgcattacgatgtcggtgctctcctggtcgaggtcgccggtcggctcgtcggcgatgagcaggctcggctggttcatcagcgcgcgggcgatggagacgcgccgcatttcaccgccggacagctcgcgcgggtagctgtctgccagatcggcgacaccaagctgggtgagcagcatgcgagctcgggtggcgaacaggtccggacggctcgcagccgtgtttgacggcgtgttttcccggtctgtgattggcgcaatgacatccggcatgaacaggtcggcggctgcttcatcattggtggcagcggcttgtgccacggcatcggtcgacgcaacagcgtccacctgagcaacggcatccgttgcttctgcgttttgggcgaacggcagcggctccggaaacatcgttgcgggcagaatcacgttgtcgagcacggtcaggttgccgagcagggtctggctttgggtcacgaatccgatggtgcgattcctcagcacggacagtgctttatcgcccaagtcggccacattgcgtccagccacgctcacggttcccgaggtcaggcgaatcagcccggcgaccatgttgatcagcgtgcttttgccgttgcccgaccggccgacgatggcgatgaattcgccggcatcgacggtgaggttcacgtggctgacggcgtcgaacggcgtgccgcggcggacgaactggcgggtcaggtccgtcaaggtcagcagatggtccggggagggcgtctcggttacgtgcggcgaatccggcgcagtcggcgcgttcggctgagctggcgtggtcggctggagcttggtcggctcaaccgtggtcagctgagtcggcgtagttgtctcagtcatatcactccccctctcgcagggtcaggtaggcttcgggccggccgagacgccacatggtggccagcgaaccgatgatgctgatgaccgtagagcacacaatggtcacggcaatgaatccgatcaccgcaaccgggctggcttgcagatacggcaattgaagttgtttgccgatcagcgaactgaatgggaaaatcaccaggctggccgcgccgacgccgattacgccaccgatcagaccgatgatggcggattccttcagaatgatggcattcaacatgccgcgcgtggcgcccatgatgcgcagggacgcgaattcgcgtttgcgttcgttcaccgacgaggcgaatacggcgagcagcacaatcacgcccattacccagatcaccgccacgaaaatcttgaggtaggtgacaagcgcggtcagcgaagttctggtgttggcggtgatgccgccggggtatacgtaccccaaatcggcgaaccgggagtcaagacgcttgatgttttcagccacggtctgcgcttcgtaaccccgctgcgtcttgatcatcacggtggagacggcttcgcctgcatattcggcgggcatgacctgcttggagaccttggccgaggcggcgaccatatcaggcacggtgttttggttgatgaacaccgaattgtcgaggctggtgccggtgttggcgagctgggcgacgaccggccacttatggccgtagagttcgatggtgccgtcggtggacacgttgacgtttgcgccggcaatcatctgaccgtcttcaagggggccttcgaactgggatgcgacccatggttcgatgacgaagtcagtgtccgggtcgtaaccgatgatctgcagcttttcggcacagcaggcggcggccagcgatgatatataggtctgttcggtggcctgtgcgatgccgtcggcctgcatgacctcgtcggcgatgtctttggtgaaatagaaagtgctgggattgccgctggtgagcagcgcttcagccttctgcgcggtgttttgcggcacgaccataaggtcggcgcccaggcgcttctccatactggtcatgccggtgttgaggttcatggtcagcatggtgccgccgaagaacgtcagcgcgaggatggtgacgacggcgagcagtgcgccggtgcggaacggcttgcgtttgaggttttcaatcggaaggccgcgcaatgcgatatgggatggcacgatgagtccttatgttgcttatagtgcggttgcaataagcgagaccggagtccagcgttcggaatggctgggctccggccgtctgctcgatcagttgcgcttggcggcgcgagagtcgagccagatggcgatggccgcgaacacgatggtgagcacgccgagcacgatgagcgtgggcagcataaccatgcggcagtgcatcatcgcgcccttgcagatgccgatcaggaaggtgggtacggcgagtagtagcagggcgttggctgcggcggcgatattgaggccgatgcgaatctgcggggcgacgaacaaagccacgacgccaaacacgaggatgacgacgccgatgccggtggccgcctgctgcgagtagtggcaggcacccggcatgtcatggccggtgcaggcgtgcgcaaaggtctggggcgcgatggtgatcagcgcgccgaacagaatattgggcacggatgcaaacagcttgttcttcataactactttttcctctcccctgttcccagggctcgtaggcacaacctccgcattatgcccagatagtgatgaagaacacaagtcttgttttttgtgaatttatttggtatataactcagcccctcgtcagaggggccaatctatctacaacttctcaataggtgctacgcggagcatgaggcgtttgacgccggcggagccgaagtccacggtgattaccgaattgcggcccttgtcttgcgcgtcggtgaccttgccgagaccgtactggtcgtggctgatcatgtcgcccacggcgaagtcggcgatattcaggccattgtccttggtgagcttcgagctgggcacggcagagccggtcgaaccggatttcggtgtggtgcggcgcgtggtgaccttgccgccacgggtgccgccatatgaaccggatgaagaaccggaacgggaacgcgacccgtaagacgaccccgaacgggagcgagacccgtaggaggacgagccggagcgggaatcatatgatgatgaacgggaaccgtacgaagaacctgaacgggaaccatacgacgaggagccggaacccgagccatacgacgacccataccgcgaccgcgacccataggacgaacccgaaccggacgaaccacgcgagccgaacgtcgacgacccgccaaacgtggcaccgccgaaatcgtcatcatcccagccgcccaaatcgtcggcgaatccatcggtctcccagttggcgcgcatacgctccacgccggcttcacggcgtttccaatcaatcagcgaatccggaatttcgtcgaggaattggctgggcatcatatcggcggcctggccccactgggagcggacggcggcgcgcgtgacatacagtctctgcttggcacgcgtgatgcccacataggcgagtcggcgttcctcctgcagttcagtggtgtcttccatcgaacgcgaatgcgggaaggtgccctgttccatgccggtcaggaacaccaccgggtattcgaggcccttggcggtgtgcaaggtcatgagcgtcaccttgccggagtcctccgcctcaccgggcagctggtcggagtcggccacgagcgcagtggtctccaggaatgcggacaacgtggcgtcaggcgtgttctgttcgaattcggctgcggtggactgcagctgggagaggttctccagacgggaggcgtcctgcggatccacggatttctcaagttcggcccttaagcccgacttctccaatacttcggccacgatctcgctgggcttggagtcgtgcgcgtgcgtgaactgcgagagcgcgcccatcagatcgcggaatgctcgtagcgaggtggcggtgcgggtcggcacctcgatctcatccaagtgcatgagtgcgtagaagaagctggtgccatgctcgcgcgcgtaggcgagcagcacgccttcggcgcggtcgccaagcccgcgcttgggcacgttgagaatacgacgtagattcacatcgtcgtccggattgacgagcgcctgcaaataggccagcgcatccttgatttcgcgacgttcgtagaacttggtgccgccgacgagctgatacggctgattcgtgttgatcagcgcctcttcgagcgagcgggattgggcgttggcgcggtacatgatcgccatgtcggagtaggagatgccctcttcggcgtgcaggcgcgcgatttcggtggccacccactgggcctcctgctgggcgttgtccgccgcgtagccgacgatcggctcgcccttgccgagcgcggtccacagtttcttgggcttgcggccctcgttgttgctgatcaccgcgttggccgcgtccagaatggtctgcgtcgaacgatagttctgttcgagcatgatggtcttggcgttcgggaagtcctgctcgaagtcctggatgttgcggatgtcggcgccacggaacgcgtagatggactggtcggaatcgcccaccacggtgatccaggcggggccggacttgccggcgttcggcgcgcccgggatggccttctcccccgtgtccacgccggccagctcgcgcacgagcacgtactgggcgtggttggtgtcctgatactcgtcgacgagaatgtaacggaagcgttgatggtagtactcggcgacggccgggtcggtgcgcagcaactcgaccgtgcggccgatcagatcgtcgaagtcgacggcgttggccagggccaagcgatgctcgtattcggcgtagatcaccgcatagatggcttcaaggtcgcccaccgtgccgaactggtagccgcgctggccaggcgtgaagtcgggcgcgtgaacggcgaggttttccttccagccggtcaggttgttcttgaggtcggagatgtggccgaggatcgagcgtggagtgtagcgcttgatgtcgaggttgaattcggtggcgatgattttgacgagtcgctcggagtcggcggaatcataaatggagaagccggacttgagcccgatggacttgccgtcacgcctcagaatgcgcacgcaggcggaatgaaaggtggagacccacatgcgctgggccaccgggccgatcagcgaaccgagtcgttcgcgcatttcggcggcggccttgttggtgaaggtgatggccagaatctggctcggccatgcgccgaactggctcaagatccaggcgatgcggcgggtcagcacgcgggttttgccggagccggcaccggcgccgatcagcagcgcctggccgcggtattgcacggcttccgcctgttgcgggttcagatcgcctacaagttcctgcgcgctgcgtgcaatgacttccggctcgtcgtacactgttgcctccctttgaatcgcgacattcatgtttaccacatgcacgggtcagcgcaggacaacgtacacttacgagtatccatatcactcactgacatacagcaatggaggtcaaatgcaggaacttgaggagcgaatccaaagcgagggaacggtgaaggcgggtgatgtgctcaaggtggacgcgtttctgaaccaccagtgcgacgtgcgtctgttcgaccgcatgggttcggcatgggccgctcatttcgccggcaagcacatcaccaagattctgaccatcgaggcgtccggcatcggcattgcgtgtgtggcggcccagcatttcggcaatgtgccggtagtgttcgccaagaaggcgcagtccatcaaccttgacggcgaccagtacaccaccacggtctattccttcaccaagcagaaggagttcccggtgatcgtggccaagaagtatctgaacgccggcgagcatgtgctgcttattgacgattttctggccaacggcaaggcgttgcgcggtctgattaacctgtgcgaggcggccggtgccacggtcgagggcattggcatcgccgtggagaagggcttccagggcggcggtgacacgctgcgcgctgaaggctacgatgtggattcgctggccatcgtcgagtccatgaatcccgagaccggcgaaatcacatttaggcactgagcacattgcctgctcccgccggcgggagcaacagagagaagaagagaatcatgtcagagaagaaaaccaagaattccgtatcctttgaggcgctgtcttcgctggacgcacccgtatccttctggaagggcattccgttcggcctgcagcatgtgatggccatgttcgtggcgaacctcgccccgatcttcatcgtcgcctcggccgcgaaaatgaccccggcccaatcggccaccatcatccaggccggccttctggttgcgggcctgggcacctgcctgcaactgtacggcgcgtggctcatcggctcgcgtctgccgatggtcaccggcatctccttcacctacgtggcggccgccgtcgcgatctgcgcggacaagggctatggcgcagtggtcggcgcggtaatggtcggcggtctgctggaactcgtgctgggtttgacggccaagtattggcgtcggttcgtgccgcccatcgtctccgccatcgtggtcacgtcgatcggcttctcgctgctcaacgtgggtgccacgagcttcggcggcggcagcggagccaaggacttcggttcctggcaaaacctaacgctcgggcttatatctttggtcgcctgcctggcgttccagctgttgatgaagggcacggccaagcagctgtccgtgctgttcggcctggtggtcggctatgtggcggccatctgcatgggcaaggtcgatttctccggtttccagaacctcgccatcgtgtccgtgccgcagttcatgccgttcaagcctgagttcgactggggttcgatcatctccatcggcctgctctacgtcgtctcctcggtcgaggtgctgggtgacaccgccgcgctgaccaaggtgggcctgaaccgtacgcccaccgaacgcgagaccgcgggcgccatcgccggcgacggcctgatctccaccgtatccggcctgttcggatgcctgccgctgacctcgttcgcgcagaacatcggattggtggccatgaccaaggtcgtcaaccgcaaggtgattctctccggcggactgattctggtgctggcgagcttcgtgccggccatcgccgaggtgttcaactcgctgccacaggcggtgctcggcggctgcacgatcatgatgttcggcaacatcattctttcgggcttccagatgatcgccgaagcgggcttcacgcagcgcaacatcacgcttgcggcgctttcgctgaccatcggcatcggcttcacccaggtgagcgacatcttcgcgcagttcccggcactgttccaacaaatcttcgcctcgaactgcatctccgtggcgttcgtggtggccgtgatcctgaacgccgtgctgcccagcgaggggcacttcctctctgcgcccaaggaggcaccggccgcggacgccgagtgataacaacgcgacatatcagctgcgcataatcacatgatgatgccctatcgtcttgcaggatgatagggcatcattgattttgggagagactacaagttgaaccatgagttcgagccggtggcgtgtcgatcaatcgtcatcttcccattcgaggatgtctccgggttgacagtcgagcgccttgcagatggcgtccaacgtggtgaagcggacggctttggcgcgtccgttcttcagaatggacacgttggcgggcgtgatgccaatttgttcggcgagctcgccgacgccaatcttgcgtttggccatcatgacgtcgagattgatgcgaatcgtcatctcaaatcacctgctcgagttcgctcccgatccggacaaggagaacagtttccatacggccacgaacgccgcttcgatgcagagcaggaacagcacgcccataatgagatatgaccagtacatcgacgtctggctcgggcagaggccggccagcgcgccgctcaatcccggtacggcgaatagttggccccataggcaggccagccagaccagaatcacgatggctttcaacgcgagcaacacccatcggttcatgtagtttttcatagcccggtcctttcaggtgccgacgtttttgacgacaccgcgaacatcgatatgaatatatcgaaaaacgatataccatgcaaggtgtattgcgtcaaccggcattggtcgctcgtatacatataggcttcggcagaccgtcagcagaccgtcagctcaacggagcgaacgccatatgagccacccattcgcgtacaagcgtgatgacggcttcgggttggtcgatgtgcgtgttgtgaccggcattgtccagcgtcacgaaggtggcgttgggatagtgcggcaacagggcttgctggtcttcgtatccgacgatctggtcttgcttgccggtgacgatgagcaccggacccgcatatgtgccgagcatttcctcgggattatcggccagccaataacgctgatccagtcgttcgcatgccgcacggtcgcacaacgccacgccgggcaggatgaaccgttggtagcgccgccacgcgtcgaatgactggttgacgcccatggtaatgaaatcgaacacctgttcctgtggcaaggagtgtgtcagcttgggattgggctgtgcaaccacatgttcggccacatgccggccggcatgctgcgggtccacgaccggcgcgatcaatgccataccggccactcggcgaggttcgcgcgccaatacttcgcggacaagcgcaccacccatcgagttgccgaccatggcaaatggagccgctttaccgacaaggccgtcaatggccgtttgcagccaatccgccatttccggcagcccgcaggcatgctcgggcaatgccggtgtacggccgaaaccgggcagatccagatatatacggcgaattgaatcattgccgtcaaacgccttgtcgagcatcatcagcgaacgatggtccacacccatgccatgcacgaacacgacgggcaatccatcatcattgccctcaatcgcgcagtacggctgcaattgtgccatgtgttcctccccttcaacccggtacaaatcgcctttcacacaatagcggcagtagatcccttggtgtcggagcaatcccgaccgccattctcggtttcgaggggctgatttcgtggttcggggacatccacttccgtttcaaggggctggtcattggccaaaacccaagtacgaatggcttcacgccaacgtcatttcgccgctttggagctgttgctactcggccatcagcccctcgaaacggaagtggatgtctcggaacgagcaaatcagccccttgaaacacagatagacgattacgaatcggcttatcagccgcgtcaaccttgcaatacagatgtcgtcgtatcattccccggtctgattgcgcggatgtcatgaagcgtgaagaattgtcacgaagtcgcgtgatggcgcagccgccgttcaggtggatatgccacgctgtcatgatgacggccgagccgggacacggcaaatcccgcatgctgcataggccagccggtcacggtcagccatgacaccgaaatattggaggcgcaatgggacaacaggtgcggtacggcagacgccgctcccatggcgcgggcgcgctgattgcagccgccatacttgttgttgcggtgctgatcgcggcatggacgctgctgccacggctattcacgcctcgcgagaccgcgcgcacggccgaggaagcatattgcgcggcggtgtcgtccgacggagcccgccgcaccttgacgcctgatcaggcgcagaacgcggcgctgattgcgaacatcgccgtcacgcgcggactgccggatcacgcggcgacggtggccatcgccacggccatgcaggagtcgaggctgacgaatctggactacggcgacttggattcgctcggcctgttccaacagcggcccagccaaggctggggcacggcggagcaggtgtccgacatgacctatgcgacaaacatcttctacgaccatctgctgcaggtgccggattgggagacgattccggtggaggacgccgcgcaggaggtgcagcgctcaggctacccggaactatatgccacatgggatgcgatggcacgcgcttgggcctcggggctgaccggcgaacggtcggcgggcgtcacgtgcgcgttggagccagcaacctcctcggacgcggacgagttggttgccgccataggcggtacactgccgaatgtcagtgtctcggttgcgcccccaaatggcaaaaccggcacgaacaacggtgctgcgaccaatacggccagcacaacgttgacgatcacgctgccggacggcctgtccgccgacaaccgcactcgactttgctggcagacggcaggctggctggtcacgcatgcacgtcaatacggcattgacgcactgcacgcggacggcatggattggaaccgcaaagccggtacatggaccggcatcgaaaccgccgagcagaccgtcaccgtcacgcttgcgtgatgtgacctataccgccgtcgcgaccacaaatccgactgactggagtctacgccgtcgatgccgcctgaggcacgatacggatatgatttttactcgttcgaatgagcccaatccacgacggcttcgatgttattgccatccgggtccagcacgaatgcggagtaatagccgggatggtacgggcgcggaccgggagcgccgttgtctcggccgccggcggcgagcgcggctgcatggaacgcctgcacggcttgctggctgtcagccaggaacgcgatgtgtgtgaccggcgtgaccggcgaagcctccgcctccggcccgtcaatcggtgacacgtagaaatcggagtgcagggttccatcatccacgccgaatccgagcgtgggctcatgatgcgccttgacgatatagccgagcggtgcgagcgcctgtttgtagaatgtgatgccacggtcgatgtctttcacgtgcaacgtcagatggtccagcatggtcttggtcgccctcccctggttcttgtattcgattgctgcttgcagtgtaagcccgaacgtttccccacagggccgcgcatggctatgatgagagcaatcgcacgtcgagttcgagacaatattcaaaacgaatccaaggcaatagggggaatgacgatgaccaaggcactgattgtggtggatgtgcagccgacgttctgtgaaggcggcgaactgggagtcgaaggcggcaacgcggtcgccgagcggatcgccgattatgtgaacgcgcatcgcagtgagtacgcgtatatcgcaaccacgcaggactggcatatcgagccgggcgcgcactggtcggcggaaccggatttcgtggacacgtggccgaagcatggtgcggccggcacgccgaacgccgaattgcatacggcgatcaaggcgctgaatatccagcatcatttcaagaagggccagtattcggcggcatattccggttttgagggcatcgaggacaataccgaccgtatccagacccgcgaggaggtcacggccgagcaatccgccggcaagacgctggccaatgcgctgaaggccgccggcgtgagtcgcgtggatgtggtgggcatcgccgaatcgcattgcgtcaaggacaccgcgctcgatgccgggaagctcggtttcgaggtcaccgtgttcgaggacctgaccgtaccggtcagcgaggagctcggtgtcgcggcccgcaaacagatgacggcggccggcatcacattggccgagtcccgctgatcaggccggatatacccagagcgaacgcacgaacacttccgtatattcaagcccgacactgccgcatagtcgcctagtcgatatgtgaagaaggcttttatggttacgatgctgctgacttcgatattccgcaacgcctcgtccgccgtgcatgaagtcgaaccgcatccgcaaggcaagcgggtcgcgttcatcccgacggcgagcgccgtggaaccgtgggggccagttcactcggcgttgagcaaacgcgcgctgcaacgcctcggtttcgaggtggagcaactggatgtggaagatgtgccgagcgggtccgccgaacgcgtcacacgtagcatcgccgaggccgactacatctatgtgggcggcggcaacacgttcttcctcctgcaggagttgcgccgcaccggcgccgaccgggccatcatcgagcaggtgcgcgccggcatgccgtacatcggcgagtccgcgggctcggtcatcacggcacctgacatcggctatatcaagctcatggaccgcacggacaaagcccccgatctcaccgattacgcaggattgggcttggccgatttccgcgtggtcccccaccatcatgcaacggccatgggccacgccgcacaacgcattctcgaccggtatggtgccgatctcagtctcaagcccctcaccaaccggcaggccctgcttgtcaaggatggcaaaacccggctgctgcgatgatgcgggtcgtcggcccgtcgcccattcggcatcgccgtggtgtgtccggcctgacatgcctatcgagcggcatccatcacacagcaatgtggctgggaacctcgccgaacgtcaacacctgcatacatcagcacggcaaaatctgccgaaatcgcccggcgcacgagatgccagccggccccatccgtcacctcagtgccgtaccgggccaggcatggccttgagcaacgggatgaatccggcgcacagtaccagggccacgacggcgagtatctgccagtgggcggagccgagccagccgccccacgtgccgacggcaccgccgatcgcatacgcgaacctggcacggccgctgaacttggccaggtcaccaccgctcagcagcagttgtcgcgatacgatcacgccatgcgccagcaggccatagccgaggttgttgatgagccatccgacgcacaccgcggcaaactcgggaaccagtacggcggcaagggaaatcgccgtggcgattgccccgatggcggacacggcgcgcatgccgagttttgcggagagccgcatgtagacaaacgatccgacgatgctgcccacgccgccgaatgcgtagaccacggtcagcatatcgctgccgtaccgggagccgatgcccagcaacgcatagcttgcccacagcgacggaatcagcgcaagcagcagcgatgcgatcagcagtctgacccgggtcaagcgggtgaccggagtgcgctgcggcgcgtgtgacgtgtcggccgccgtggattcgtcggcggagccgtcgccgtcatcgccgcccgcaccatcgttgccgaatcccggcatgaactcgcgggtgcggaatcgcgtcagcgcgcaggcaaatgacagtgccgacgaggtgagcagcatggccatgatggaggcgttggccaaggccgatccggcaacctggcccagcaacgtaccggccacgctggcaatcacggcgacgtagccgctgtacttgacgagcatgtcatcgtcgtcgccggccgcatccacctcgaacacttcggaggccacgtcgatgacctgcccggtcatcagcagcaggcatgacagggccagcagcagccacttccaatacgtccaaccgttgggcaccagcgcgaccgccaggcacagtacgccttccacgccctccgtggtcgcaagcgaacggaacgagccgaaccgctgcacgatccatgcggataccggagaagcgaagtcgatgaccagattgaacgtcttgcggagcgcgatcacccatgccggcagtccaacgatcagaatcgaaggaatcaccgacccctcgaaaatcgcgttggacagcatcgaaaacgtcatacccaccaacgcccatcgcaacgccctgctcaataccgacaatccgcgcataccaatcccccacgagcaaaccccaacatatccgccgcaacagcatacccaccatttcgatggtttgcaaaccggtctacagtgagaatcagagggggccactatgcgaatcatagaacagcactgccaaggcaagaggtctgaccagtcgctcaatgaggacgggctgatcatcaccgatggtttcgcggcagtggtggatggagtgaccagcaaaagtgtgcaccaccctgccggccttgttcttggccgcgtccagcaccggcgcgaggcctgcggcccattcgcgcaccgaacggccggcgagcatgtcgttgccgcccacgcacacgatcagcacatccggccggtcattgtccggtagcgcacgcgccgggcggtcgcgccgagcttgccgaccgtacgccaggccaccggccgaccggtacgcttgcgacgcgcgcggcaagcagcggcataatgcctttcgactggtcgtccacgccacatccggccaccaatgaatcgccgaccatgacggcaagaatcggcttcacgccgttcgcgcctttccaatcggggccgatcggcgcctcgatatccaccacgcgacccttggcatcgaacaaaccgaaccgcttgcccttcggctcggacgccaacttcacccggcccttggcccacataccctcaatcggagcaacggcagcatcaatcacacgcaagattcccacggccacccaacatagtccgccctcctcgacctcgttagcggccagtagcaacccatattcgaaaactcgataaccatcgtcaattcgcataatttgaacgttttaggtgttttggtcgctttggacgttttatactgtgacagataaaaaggaggtcaccatggcagaatccgacaaactcaccattccacgaacaatccttccatccatcaacattgacgacatgacgacattggaggcattcaccgcacgatttcttgatgagcggatcttcatcaaagatgccagcggcgtggagactcccctaccttcgcagctttgcgacgccgtcaggcagacggccatccttctcgccgaaggcaaaagtgtaacgatcagtgccaccgaacaagatctgactaccgaacaggcggcggcaatgctcggcatttcgcggcaaacactgataagactgcttgataaaggacttattcctttttcacgtccgtccaatcaccgtcgcatccggctggaagacctgcttgaatacaagcgagcctcgaaacacaccaaggactgcgccctgagccaaatgatcggcgtcggggaagacgccgaattgtacgacctgcccgagccgaccccgcaggaagccatgcatgcggtatcggaggtaaggagagtacgggccgatgctttcggtgtttcttgatgccaatgtcatctattccatcaccttgaccgatgttctgctcaccttggccgagcatgacctttttcttcccctgtggtcgcctaacgtattacaagaagcacaggaagccgcctcccgaacactgcctgacgccgcacaacaagccttccgaaaaagactgataatgatggaccaggcattccccgaatcctccatacatgttgaggaatcggagtggagccaattcgatctgcctgacccggatgatcgtcacgtacttgcggctgcggcacagggacaagcagacgcactggccacgcgcaatatcaaggattttccccagaaactgcttgactctttctccattcaggtcatcacgccagatgatttgctctgtgtattacttagacgaaatccggaagccacagctagcgccatacgtgagcttatcgattctcgacatcggccaccgataaacattcccgactttgctaaaagacttgaacgctctggcgcaacacagtttgcagccgctattgcgcatatacgacagcctctcgacaatcattcgtactttgaccagtaacccatgaattctggatgaattggggtgaaccggcggggctggaggcgagcgggcggcggattatggggcacaatggtgtcaaggaggccgccatggtcgatgactatactgccaaaatgactgagctgatcgaactcatgcgcctgatcggcaacgatacgcagcagtgcgaggtcaaggaatgcaagcgcaagatctcctcgaccatcaccgatacgctgtccgcgttctccaatggctccggtggctggatcatccttggcctgtccgaaaagaacgggttcacgccggtcgagggattcgacgcgcgcgccatgcaggaggcgctgagccaggcgtgcgagaagatgacgccggtggtgcggcccgtgatcgtcacctgcccgttcgaaggcgcgaatctggtgttcgcgcgcatcgacgagatgctgccgcgcgacaagccctgcttcaccaccgcgctcggaccgcacggcggctcgttcatccgcaccggcgacggcgaccggcgcatgacctcctatgaggtcgaccggctcatcgaggagcatctgcagcccacgtacgatctggatatcgtgcccggcgccacgaccgatgacctcgacccgcagcttgttgccggattgttggcgcgcgtgcgcgagcagcatccgcgcgtgttcgccgaccgggacggcatcgatgtgctgctggatctgcaggtgttgcgccatgatgattccgacgagtcggaggtcggcggaatactgcgtcccaccttggccggactgctggcgttgggccgctatccgcagaagttttatccgcggctcggcatttcgatagccgtgtttccgggaacgagccgggacgatgtgttccggggcgacgaacgattggtcgcctcgaagtcggtggtcggttcgattccggtgatgatcgacgatgcggtcgactcgttgatgcgttggattggcgcgaagaagcccgattatccgccactcgtgttgcgcgaggcgattgcgaacgcgctcacccaccgtgattattcgcccgatgcgcgcggcacgcaggtgcatatcagcgtgttcaccgatcgcatcgagatcaccaatccgggcggtctgtatggcatggtgacacatgatgtgctggcgagtccgcatccggtgacgggcgcgccgttcgtctccacccgaaaccaattcctgttcacgctgctggagtccacgccgtatccgggcggcgggtttgtgaacccagaaggcggcgacggctaccagcgtatcgccgccgcgttgcgcgaggccggcatcgagccggcgaccacgcgcaacgacatcaacacgttcacgatgaccatcaccaagcaacgcacgatggcgaacagttcgccgggcgacgtggtcaaggcgattatgaccgtactggagcggcattcggcgatgagcgtcaaggagatcatgcgcgaactgcagttgacgccgctggccgccacatccggtatgcgcgagctgatgaaggaagggcgggtcgcccgagtcaagttcgccgatgacccggtgcagcggtatcggttgaaaggctgattttctcactcggccagctgcgtggtggcgggcgcggccagggtgggacgggatcggcggaagcggccggcggccaggccaatgcagatgaacatcacaccgaacagtgcgaccaatcccagcgagccggcccagccggcgacgcttatgccggtttcctccgccgtgccgaagccgagcgcgttgtcgatcgcggtgcaataccaccagccgggcaggaacttggctatggtcaccatcacgccgggcatcatgtcaatcggcaatgcgacacccgacgtgaacatgatgagcaggccgaagatgttggcgaacccgttggccgcctcttccgagagcccgaactcgctgagcatgaatccgcaggcgacggtcatcagcgcgtacacgcaggtcgcgccgaacgtcatcagcactcccccgacgctcaggtgcaacggatcgagccccgccgccatcatcagaccgattgacagcaccaaatagccgacgcatacgacgagcgcgaatccgcccaacgtcagcaaccgctggagtcccatcaggaccatgcgtcggggcgaggcggtgagacgccgccgcacctcgccggtggtgaacgcgcccaggatcatcgatccgcagatggtcatcgccagggacagcgggtacagcgcggttttcatggtgccgccgaatccgctgaccgccgtatccgcagcgcttgccgactcctcggtcggcgtatcgaccacggcgatctgatggttcacgtctgtatcgctggccgattcggcggccattttggcggcctgggacagatccttgatatccggcttgtcgacttgcccttccggcagcgagtccagcatgtcttggtccagactcgcgccatcaaaaccggcggcccctcctgtagcgttcatcatgccggcgagcgccgcctggtcgaccctcgtctgcgcgccgatcagtgcggtgcgggtgagcgagaggaacccgccgacgttcatccgcgccatcgacccggagccggatgcgtagctggtaaccgtgtccacgttcggcggattgtcgccgtccgccgccgcggcgacataatcgtcagcgaatccgtcgggaatgatgacgatcaggtccacccagttcgaggcgacggcctgttgcagcgtttcgctggtgtcgtcgaggtccaccagttcgctggaatcgcgcaggtaggcgcgcatcgacgtggcgatatcaccccggtcggagtcgcggtcgatgatggcgacgcgcgtcttggtcgattcgaacaccgcggacatggagccggatgcggaggtcagcatcgcccagctgatggacatcatcaggatgcctatgaatacgaggtagatcatcaggtagacccggtgcgcgaacagcacgcgcagcgtggctttacaggtgttcataacgttgcctcctcagcattgcgatgccggccaagaggaataccgcgctcatcgccagcagaatgatgcaggtggtgatgaacggccggtagctgtcgtagtacaggatgtcgtagaacaggttcgtcacctgctgtgcggggttgatggtgccgagtatgggcgcgttgcgggctatccagtcgctgatctgcatggcaaacccgccgtacagtccggtgaacagcgacagcgtgcaggagatgccggtcgacagcccgtatttcgtgttgtacgagagcttcggcaccgcaccgagcagggtgcctgctgagctggtcatgaacgaggcgatgatgaccgcgaggatcgccgccggttcgcgtccgccgagcgagacgttgcaggcgagccggatataggccaatgcgatggacagggcgaccgacgagcacagccagcaggagaggaagcccgcgacgagctgtttggcccggctcagcggcgctacggtccgccgtatgcccagcgcggacaggttcgcctgtgcggcggcgactgtgctgatggagtatcccatggccatcatgcaggacatggccagcagcgcgtaatagtatcgggcgatctcgtcaggctggaaatgcgtgagcgtcgtctcatgggtcatgtcgacgttctgcccgacgctgttccagaagttccggctgagcgcggcctgtggattgtcggcgatggtctgccgggtaacggcgtcggtgcggttgtacaggtcgatgacgctgcgcagggccgcgaggctaatgtccagtccgctgttttgcgtggagtccttggctgtgacggcggtttcccggctcacggtcatcgccaatcggccgttattgtcggcggtcagatagccgttggcagtgccgtcggcgagccgttgttcggcctccttcacggtgtcgactgtggtgatggtcagcagcttttggtcgatttcggcgtaggtcgtgtcgtctgaggccgattccgtttccccggccagcgcgtctacgaaggtgcgggcaccgtccgcctgctgccaacgggtgtcttcgatgacggccatcggcaccggcttgagttcgtatgcttcggccagcccgccgaacagtccgttgaacatggtcgccagcacaatcgggaacacggtcatccagaacaacgccgaccggttacgcaagttcgctttcaatgcgaccagaaatgtggtccacatgatgtctccttactcaggaactcccctcagtcacctttggcgacagctcccctcggagaggggagccaagttatttgcttgccgactgagggaagcatggtcagtccctcagtgctttgccggtgagttccaggaatacgtcattcagggtgggcgggcgactggtcaggtggccgatgttggcgccggagcgtttcaccgcgtcgagcacgtcggtcaggttgtgttcgccgcgacggcatcgcacgtcgagttccttgccgtcgtaggtggcttcgatcacgcacggcagcgcacggacctcggccatcgccgaatccgccagatcgagcgtttcgatggtgatgcgctcgcccgtgtcgatcatgttcttgagctcgtcggcggttccgagcgccaggtgccggccgtggtccatgatgaggatgcggtcgcagatctgctcgacctcctccatgtagtggctggtgtagatcaccgtggcgccggcctggttgagccgctggatgccttccagaatcgaattgcggctttgcgggtcgacggcgaccgtgggttcgtcgaagaagatcaggtcaggcttgtgcgcgatgccgcaggcgatgttcaggcgccgcagcagaccgccggacagtttgccgggccggaacttgcggaagtcctggagaccgacgaattcgatggcctcctcgaccagcggcgcacggtcagttttcttcggcacgtacagcgagcagaagtagtcgatgttttcggtgacggtcagttcgttgaacacggccacgttctgcggcacgatgccgatacggcgcttcagcgcgtaggaggtcggcgtcatcggctggccgaatacgcgaatcgtgcccgaatcgtaggtgagcaatgcgaggatgcagttgatcgcggtggttttgccggacccgttcggtccaagcagcccgaaaatctcgccctggttcacgtcaaggtcaaagtagtcgagcgccaccatgtcgccgtagcgtttgaccagttggctgacgtgcacggccagggccgggttggttgtcgagtcgtgttcggaagctctgttgtcggttgccatagccactcccttccttggtgattccatcatcccaagaaggggccggacgccgccacaggcaaacgtcacgacttggccgcacaggcgtgacatttgtcattacagcccttcggcgtcggtctgcatggccttgtacaccttatcgaccggcatcaggctgatctcgtccatcgaatagttggacgccctgtggctttgcgcaatcatcggtatcatccctttacggttgtgtcgacaacatccgacgcttgtgcctcatctattcgggaagtgtgacccgttgtcttggaccgtcatgcgaataattccgcacgcccgtcaagttcgtcgtgttccgcacaccgctagactggtggtggaagagcgtcgagccggggaggtgccatgcgcgtgttggccgagaagggcttgctgctcgtgttgggcctggctttggcctggcttgtcggggtgcggctcgatggcgtgttcatcgccggcctgctgttggccgtttccgtcgccggattggtggaatggctgcgtcccgcgcaatggtcttgggtcttgtgtacggcgtatctcgtcatcgccgtggcagtgccttcatggtgcgcgttcatgccgctcatcgcctacgatactgcacagctgccggccctcgcctcgaccggagcccgaactggggcacggactgcggcaagcggccgctcccccagtgtctcgcggaccgcggcctctcgccgttcccttgccgatgcaatacgttcggccccgtggctttcggtcgccgcgcgctggatatgggtgttgccgccaatcgcgctctggttcgcccgtggcaccgaccgtctccagacgctggtgatgacgatggtcgccctgcttggattcgttctgggccgggcccgcgcctcctcggacgaggcgcggcgcgcgttgctgcacgcgcaggacagggcgcgcgaatcctcgcgggccactcgttcgcgcatcgccgacatcgatgaggaacgcgcccagtcgattcgcatggcgaccctcggcgagcgcacgcgtatcgcccgggagatccacgacaatgtgggccatctgctgacccgcgcgatcatgcaggcgcaggccggcaggacggtggccgaggcgacgaacgatacggtcgccgcgcaagggttcgccacgttgggtgcgacgttggatgatgcgatgacgatggtgcgccgttcggtacatgatcttgaggatgacggcactgatttcgccgcgcagatcgatgatgccgtcacgtcgttcgacggcatctcccccggtttcgccgtgacgctggccaacgacatcgccaaggcgcccgcgccggtctcgcgctgtttcgcgaccgtgattcgagaggcattgtcgaacgtggtgcatcatagtgcggcgcacgaggcgagcgtgacattgcgcgacttccccgcattctggcagttggtcattcaggatccggggccggccgtgtccgagtccgatgggtcccggacggccgctgcccgcctgtgtgcgatgtgcgccacgcgcgtcggctcgcgactcgccgccgacggcgttgccgatatgcgtggttcggccgatgagctgatgcgcggcatgggtttggcggatatcgaatcgcgcgtgcgcgcccttggcggcaccgcggtctgcgggccgtatgaggacggctggcgtgtgttcgtatccgtgccgaagaagcgttggaccatggaatcgagggattgatgagaatcgcaatcgtggatgatgatccgatcgtctgccagtcgttggagacgattctgacggccaccggcacggccgaggtgctatggacggcaaatgacggcgacgccgccgtgcgccgttatttcgagacgccggcgagccgaccggacgtgctgctgatcgatattcagatgccctgcaccagcggtttggatgccgcgcgcgaggttctggccacggacccggccgcgcgcatactgttcctgaccacgtttgcggaccagtcgtatatcgcgcaggcgatggggcttggcgccaagggctatctcatcaaacaggatgtggcggcggtcgggcctgcgctgcaggcggtgatggccggtcaggtggtgctcggcgcggaagtgctcggcaagctcaccgaacggactccgaatcctgccgattccgacgattccagagataccgccgattccatcgagggcctgcttggcgagcgtgagcgtgagatcaccgcgctggtcgccgagggcctcgataaccgcgacatcgccgccagactgttcctgagcgaaggtacggtccgcaatcgcatcagcgcgatactggacaagctcggcctgaccaatcgcaccaaactcgccatcctctggctcaacgcccatcggtgaggggcctttggtcaagtaggtctctctccgtcatcgcttcgcgatgccacctcgaacgcgattcaggacagcttgcagctgacctcttattcgctcgttgtcactcacccttgcctaaaaacacctccggcgttttcttcacggctcggctcatcagagggaggttatgaaaaaccaacctcagctgtttttcatgacgatactgtcgatggtgttggccacgcgctcgcagtcgtcggagcattgttcgaggtgacggtacacgtcatgccaggcgaacacctgcagcggatcggtgcaggtggtgtgcagcgtgcgcatcgactcgatgaacaggtggtcggcgtccgtttcgatcgtgttgatggcgaacaccagttcgcgcaacgtcttggaatgccggaatcgcggcagttcgttgaccagctcgcagatgctttccgtggcgcgcaccaccatatccgacatctggaccgcatcgtcgcgcatgtcggtcacattgtcgtagtacatgcggttgagtacaccttcgatgctgtcggtcacatcgtcgagcacgtggccaagctcgtcgatgtcctcgcggtcgaacggcgtgatgaacgcggtcaccagttcgtccatcatgtcgtggcgcacctcgtccgccgacttctcaatcgcgtgcatgctgtccatgcgttcgcgcagctggtccggattgaagtcgtgcatgacctcggacagcagcttcgcggcctggcatgcgtagtccgcgctgcggcggaatccgtcgaagtagaacacgtctttttgcctcgccatgatgggtggattcctttctagaacacgaccatgaacagtttggccattacgaagctgatgagaccgcaaccggggaaggtgaacacccaggtgagcatcatgtcgcgcaccacgccgaagttgatggcggagaggcggcgtaccgcgcccacgcccatgatggcgctggtcttggtgtgcgttgtggagacggggatgccgagcacggtcatgacgagcaggcacagcgcgcttgacagatcggccgagaagccttggtatttctcgagtttcaccatgtcctggcccacggatttgatgatgcgttcaccgccgacggacgtgcctacgcccatgatggtgctgcacagaatcatgagccagaccggaatcatcacaccggtcacgctgggttggccgttgcagaacgccatgccgaggaacagcacgccgatgaacttctggccgtcctgcgcgccatgcatgaagctcatggccgccgcgcccacgatctgcgcgtaggtgaagaacccgttggtgcggcggcggtccatgccagcgcaaatcagggtcacggccttgcataccaaccagccgacggcgaagccgaacaggaggcttgcgaccagaccgtagagcaccttgacccattcgcccatgttgatgccgccgatgccgccttggatggcgatggccgctccggacaggccggcgatcaggctgtggctttcggaggtgggtatgccgagcagcgaggcgcccacgctgtatacgacgatggagaacagcgccgcgcatagggcgatgagcgccgcgttcgtgtcgccgccgaaatcgaccatgttgctgatggtggaggccacggaagcgttgagctgcgtcatgatgaggacgccgaggaagttgaagatggccgccatgatgacggcggagcgtacgcgcatgcatcgcgtggtcacgcaggtggcgatggcgttgggtgcgtcggtccagccgttgacgaagatgactcccagcgtcagcaacgttgtgacggtcagagccgggttggaaagcacttgttggaggaaatgcgccagtgagacgtccaaggggaatcaacaccttcttcttcgggggcggaagccgtcacactgattgtaacggaagaatggctacgtagttcccatggcgcgcggattatatggtgttgttatgttgcgcgccgcgcatcctttcgtgaaaacagagcgggacagtcgtatgcttcgattcggcgcctgcatcgacaactctcgtcatctaccgaggattcggtcatgcgtgtgcgaaaatggacacggtgtcaatcaggaggtgcacagtggttgtaagcacggattcgagccgcacaatgcccgattgggtgaagtacggggtgttctggcacgtgtatccgctgggcttctgcggtgccgatatcaggcccgccggcccgcgccagttccatggccgcggccttgacgcgatgatcccttggctggagtacgtgcgcgatctaggcgcgtccggcctgctgctgggtccggtgttcgagtcggcgacgcatggatacgacacgctcgaccatatgcacatcgatgtgcgattgggcggggatgccgcgttcgaccagctgattgcggcctgccggacatgggattgcaggtggtgctggatggcgtgttcaatcatgtgagccgcgatcatccggccgtccgggcgacgcttgacgagaccgccggacgcttgaatccggccgacaacccgtggcatggtctggtccgcgcgcatgtcggtgataatgacgaacccgctttggatgtgttcgaggggcacggggatctggtggcgctggaccattcagctgacgagaccgttgactatgtggcccatgtgatgagccattggctggatcgcggagccgccggctggcgcctcgacgccgcgtatgccgtgccgagcccgttctgggcgcgcgtgttgccgcaggtcaaagccgcacacccgtattcgtggattttcggtgaggtgatccatggcgattacccgcgcatcatcgaggaatccacgatggattcgatcacgcaatacgagctatggaagtcgatccagcatgcgctggagacggagaacttcttcgagctggattggaatctcaagcggcacaacgcgttcctggattccttcgtgccgcagacgttcatcggcaaccatgacgtgacgcgtatcgcatcgcagattggcccggccaaggcggcgttggcattggcggtgctcatgacggtcggcggcgtgccaagcatctattacggcgacgagcagggctatgtgggcgtcaagcaggagcgtttcggcggcgatgacgacgtacgtccgaagttccccgactcccctgccgaactgtccacgctgggagagccgacataccggctgcatcaggcgctgatcgcgctgcgccgtcgcaacccatggctgatggatgcgcgtaccgaggccgtgaagctggaaaacaagcacttcgtctatcgttcgacgagcgccgacgcccaacactccctaaccgtggacctcaacatcgagcaatcccccaccttcaccatccacaacgccgacggctccgtagcgtaccaatattaaccagcgcttggccccctccctgaggggagccaaggaacgtcatcgacgtccgttgcgggtaccggacgagcggaatggcgagctgttcttcttggaatggtgacgcttcgggccttgtgtattgccgtatttggcgatcatacggcgctcgtgacgcttggccccctcggaacgctcatcacgcacgatgcggttctcgttcttgcggtggatacgcttgctgccttcatgcttacgcgagccgaactcatcgcttcgatcgtaatcgaatctgtctcgccgatcggacttgccgttcttggagtacttatcgccgcgacggtcatcataacggtcatcagatttcttaccgcgacggcgatcctcatatcgagtgtcggcacgatcctcgcgtcgattgccacgacgctcatcgccatgctcgaacagataatcgcgacgctcggcctcgggattgctcatgccggcgcgacgttccgcacggttgcggttcttcttcatggccttcttgttggctttgccgccgtgcttgtgctgcggctgatcatcataggactcgccgccgacattctcgtagcgagtttcggtctcggcaacgttctgctcgccacggttgcgattgcggctatgcttacgcttgctgccgcggccagactcatcgccagccatatttttggcgcccttgttcttgcccttgcgcgggttgccgacgggctgcgacttgtcgagactccagccgtccacgcgctcggctcggtcgcccacaagctcaagcacttcgggcgaatcgtgagtgacctcaatcatcttggttttgataccggcctgattcagcagtcggcgcgtttcacgacgctgttctggcagcaccagggtgaccacgtcgccggacttgccggcgcgggcggtacgaccggagcggtgcacgaacgacttcgggtcggccggcggctcgacctgcaccacaagctccacgccgccgacgtcgataccacgggcggccacgtcggtggccaccatgacgcgcacatcaccggagtcgaaggcagcgagattgcggtcgcgctggttctggctcaaattgccgtgcagttcggcggccggaatgccgttctgagtcaggttcttggcgagcttcttggcctggaacttggtgcgagtgaacaggatgcggcgaccttcgcccgaggcgagcacgcgcacgagttcgtgcttgtcgccgcgcgtggtctcgaacacgtggtgggtcatcaggtcaggttcggtggtggccgaatcgacctcgtgcaccttgggatcatgcaggaaggtgttcaccacttcatccacaccgtgatcgagcgtggcggagaacagcatgtgctgggcgtcgggcgagatctgctcaagcagtcgcttgaccggcggcaggaagcccatatcggccatttcatcggcctcatcgatgaccacgacttcgacggacgagagcgtgagcgcctgctggcgcagcaggtcctcaaggcggcccgggcaggcgaccacgatatcggcgccggccttcagatcgcggatctggtggatgtacttgacgccaccgtacaccgtggtggtgttcatgccgaacgtgtgggccagcggcatcagcacgtcgttgatctggttcgcgagctcgcgggtgggggccagcaccaggccgcgcgggtgcggcaggaagtcgtcggcgcggcgctcttccaggctggccttcttgcggcgcttgacttcgttgcggaactcctccatcgcgatttcgccaagcgaatcataggagccaagccgggtgaccagcggaatggagaaggcgagggttttgccggagccggtgcgccctcggccgagaatgtcgcggccggccagtgaatcgggcagggtgtcggcctgaatggggaatgcggtcttcttgtcatctgccgcaagcacgcgcaccagcggtccgggtacgccaagttcgccaaaggtaagggggcgggattccgcgctgtcgttcatctggaaatcagcggaatcgtcacgatcatcgaaattattacggggcacagtggcctttcatgtcaaaggttatgcaaattacgcaagctttccgagcttagcgtaagccccctactttgcttggtgttcgccacgctgtcattccactctttacttatgaccccatggggcggtaactcgcccatgaggcggtaacttgcccatgaggcggtttgaagaaattgtgaaaccgcagaataaagccattttcacctaccgccccatgagggttttaccgccccatgggatgtttgccgccccatgggccaattaccgccccatgggttctaccaccacgtaaggcgagcaccgccccatggaacacgcaaatggcccctacccgtgaaggtagaagccattgtgcaaaagggctgagccacaatacggcccagtagccctaaaacacactacaaaatatccggatcgtctttggcgatagtgccggttgccttgccaatggccttcaggccgtggtaggccacaagaatcacgatcgtgccaatggcaatgccgttgaaggaaatgccaccaacagtgaacgcgaattggccgatggcaataatcatggtgatggctgccaccatgatgttcagcggcttgtcgaagttgaccttgttctcaacccagatgcggatgccgatcatgccgatcatgccgtacagcagcgtggtcacgccgccgagcactccggcggggatcgtgttgatcacggcgccgaacttcgggcacaggctcaggatcagggcgaaggcggctgcacaccagtaggcggcggtggagtacaccttggtggcggccatcacgccgatgttctcgccgtaggtggtggtgccggagccgccgccgaagccggcgagcgtggtgcccaggccgtcggccatgagggcggtgccgatctggttgtcgtagtcgcggccggtcatctgggccacggacttgacatggccgacgttctcagccacaagcacgagcacaacagggacgaacatgggaaggatggaaaaatcggcctgcggcaggtggaacttcgggaagccgatccatgcggcgtcaccgatggcggagaagtcgacctggccgcggatgcaggcatatacatagccgatgattacgccgaccaaaatgttgaggcgacccagcaagcccttgaacagcacggccacgagcagcacggccagcagggtaaccagtgcggtgtccggcgcggcttggaagttggtccacacggaaggtgccagattgaaaccgatgatggccacaatcgcgccgttgaccacgggcggcatgatgatgtcgatccatttggagccggcgtaatgcacgagcacgccaatcagggccagcagaataccggtgaccatgatgccgaagctggcgaccgcaatgcctttgttggcggtggtgaccgcggtgatcggtgcgatgaagccgaaggacgagcccaaatagctcggcagcacgttcctgttgataagcaggaacagtgcggtggacatagccgtgaagaacagggtggtggacgggtcgaagcccgtcagaatcggcaccaggaaggtggcaccgaacatggcgatgacgtgctgtgcgccgataccggcggtgcgcacccaagtcagacgttcatcgggctcgacgacctcgccgggcgccagcgtcttgccgtcgccatgcaattgccattggaagatattggacattactactctcctcgctctcgcttggggcacggcattcacaaccagccgcactacgcgccattctagctcacgaagattttgtgaagtctctcttccgggaaaggctatttgccgtaatactccagcaggtgcggatcgacggcctgcaccacatccaccaaatcgccattggacaggtacgggcgcttgaattcgcgccacggctccaccttgacctcccagcggccggtcgtctcgtcgagcacgggccgggcggtctgctcccagcgcacacgcttggaggtgcggccggtttccgggtcgcggcgcgtgtagtgcaggcaggtgcagttggtgatcttccagtcgtccgagtcggcgcgatgcaggaattcctcgtcggccagatcctcgatggtgagcatcagggcgagcatgaagtcgccgtgggtgaccatgaccacggattccgaatcggatttgcggctcagcgaggtcaggatgttgtgcacacggtcctcggccacatcggcaatcgactcgcctgccggcggacgccagtacagcggatcggtattcttgaagttccagttgcgtgcgtagttgtttttgaattcgtccttggtgatggtgttgatttcaccccaagaacgttcgcgcagcacacggttctcctcccatttggccttgggcagggccatggtggctgcggtttcgcgggtgcgcacgtatggcgagaccatgtaacggtcgaacagctgctgctggctgacgagccagcgtccgatgcagtcggcctgcttgcgtccggtggcggtgagtctccaggagcggtcgggtacggtgacgttgtcctgcgtatacagggagttgtcgccctgttcgcccgcctggacgatgacgttcgcttcggattcgccatgccggattacgtatagatcgagcggcatgctcatatggattcctctttcgttattggttacgttgtgttgttttctgctgtttcctacttgacctgcgtaatggtgttccccttgaccatgaacgcatgccgggccatgtcgatcatcggctgatcgaacttggagtcggtgtagaactcgtcgatgacggcgtccggaccgtacagttcgcggaaccgtttggtcttgttggtgttgaagttgaggtacgtgaccttcatcgtctccacatccacctcgctggccacgagattcctcacgccgagtctgcggcaggcctcccccaccgtcagaccgaaggatgcggtgaggatcacatcgtccgactcaggctggtaccaaggcttgatacgtgcgtaatatcggtcccagaaatcgtccacgagctgttcgacgctcgccacccgtttggatcggctcagttccgtgagatagccttcggtcatcttgcccacgccgtattccatttgttcaagcgtggcccggccaagcttgtatttgaccgcgtaccgcagcacgggggcgatatagcggaacactttcgggtcgtggcgggcggaatacaggtacaagtcgaacaggctttcgccatcatagatggttccgtcgaaatcgaatacgcgcataccttctgcttctactctgttattccttgtctaaggctaatctcggtaagccggcgaaagcgcaaatacgcagtgaatttcacatgaacactgttttttggattgatttcggtacaggtaacgtacactggtgacagcgtggaaggaggtgcgtaatggcgacgtctgaaatcgaacaatggtggattgataagtttcaggagaacctgggtccgattcgcaaggtagccggatggacgactcagcaactggccgacgagctgggagtcgcgcgacagacggtgtctaacttggagaccggcaaaagcccgatgaccaagctgcagtatctcgctttacgtacggtgttcagcgccgagatcgcacgtcgtgaagaccgcgatctggcacgcatcatcaagactttggtcgacgatcccattgagcaacgcattcgcgaacggcgcgcccaagagcaggacggcgaggccgttgccgacaatgccccaatcaatacggacggtggcaacgttgccgacaacgccgccaccgagaaatgcaagcccagtgccgccacattgaaggcttcaaagactgccgcaacgggcaagcccacgctcagcacggcgatgcaggctctcgccgtcatcaccggcgcattggccagtggaaccgccgccggcatcatcacctacttgatgttcccggacggcggcccgaacaagcgctgagtcgccgaaatatcgaatccgttactcgcaggccacgccatcgtgatcgcggtccaacttgccgttgtatccaggctgcccttgatacaacggagcagcaccagccgcacggacttcagagcaattcgcataatgcacgttttgctgcgcttgctgttgctgttgtgcctgtcgagcggcctcctcagcttgccgctgggcctcggcctgcgcggcagcctgttcttcagcggcctttcttgcagcctcttcttcagctgccttcttggcggctgcctcttcagctgctttcttggcggctgcctcttcagctgctttcttggcggctgcctcttcagctgctttcttctcctcagctaccttcttcgcttcttcctcctgcgctatatcgctggctttacgaacattgataacaggcttgtccccatcttccacggattggacaacccagttcgaagctctgagcaccattttatccgtgtcgcttttcacctcataatcagaggaggaaaaaccggcatccttgagctcgtctttcacatcggccagcgaacgccctttcttggcgatggcgacaattttcgaatatgtggattcctccttgccgtccgcaccgtcagaagaccccgagcatccagcaagcacaagacccagaaccatcataagaatcacggtcaacgcccaaaccgcacgattgacacgcttcatgttcccgaaacgaaccctgttgttcaacattattctctcccttgtagtcgcagatctgcggatggtcggaaccacgtcaatgtgaatccaaccatcctgataattactgcttattcaatgatatattcatccattgttttcgccgatatatcgcaccagcgtttccctcattatcaactatttcgagttgcatgaatgcgccgtttataggccaagaatttcgtgcttttttgcatcaaattcttcttgggagagaatgccgatatcaaccaattccttcaattttttcatcgcctcgacttgttcttccacagacatggatgccgtgtgagaggcaggagcagcggcttccggtgccggcgcaggcgccggcgcttgaaccggggcggccgtcataggattaatggcttgtgccatattcatgcccagcaacatgccaccatcgccaaagccgttgtcttggatgccttgcgcaatgcgctgctgggcagccatattgccagcttgctgggaaacgccctcgtatgcggcaacattcatcttattcgaggcgaactgctgcacgagttgacgtgattgctcggtgaactcgatactttcgatgcccacactggacacttcaaagccaaaacgatcattccacgtacccgcattggcccgatcgccacgcacgcatgccgcgatgtcattcgtcttgccgggcaattgcgaaatacgatattcattggacaacgaattgatggccacaataaacgactgtacgaattcagacagaatctgcctacgtggcccttcatcatcgaatgaatacgacacggtagtggcaggcacaaagttacgaacgaatcgaactggatcagtgacctttagcgacatggatccgcgtgcgcgaatttccaaatcgacgccatagaaccggtcgttatacaccagcggcgcagaagtgccgaatttgatgccacgaatctcacgcaggttgacgaaggccacatatttggtgcggccaggctgacctccgaaggtgaatcgatcggcaacctgattgaagaacgatccgatgccgtctccggcgagcacgctctgctccccgttgcgatattcataaccgcccgactcggtgatgacgttttcgatacctgtttcagagaaaatgaacgccgcagtattctctggcacatagatacgcgaaccattggtgattattccctcggaaccgtattcattcgaaccgcgatcgttgttgcttccgcggggaatgcccggcacaacgacggtgtgttccgtgaacggaccagcggtgatgatatcacgccacaggtccgcgaatgtaccgccgagcgcgccggcgaacgccttaataactgccatctgttttttcctcgatatctcatgcatatggccgatcttgcgactctgcaatcgcaagaccggccgttatgctggcatgttggttatagctgcgtttcgcgatcgcagtattcgcatcgaacgacttctttgcgatgaccggaaagcggagcgccacaaccttcgcaattcaccgaaaccacaggttcggtaataccaagcccactacggaatgcgccaaaagtgtccttcagcgccccggccagagcctccgttccggggatggccttgttgaaggccggctcatccattggcgtatactgtctgccgcgtatacccatataccgtcatcgttcctttcttggaaaaccgtcacctcgatacgccagtctgatcactggcccaccgatgcgagcttctgcatgcatcgagtcatgacctcggtgtagtaggccgaatcctcactgctgagggagttttcgtcaatggcgtctaccttctgggagaactcagagtaacgcttcatcatgccggcatagtcggtagccatgctgaccacgttatcggatttctgatatttgttcatgaaggcaacatactcatcgataaaggcctcgtagctgtccatcgtggccttgaagtcagcactgtcattggtgttctgctgcgccttctgatccgaagactggtcgctctgcttgttggcatcgctggaatcagtgcccgtatcagtgctcttatcatcctgcttcgcggcgtcgccgtccgtagacgtatcttccttcttttccggaacctggatagtgatggacatgatggtctcgtcgtcagtgttacgagaaacgctcacactgtatccatcggcgttcttggcattgaaactgtcagcggacttgctatagtccacggtgaaaccgttgtcttgcacggacttgacgtagtcggcatactgcttggcgtcggtaccgcacacctcgatggagaaatagtccgaagactcgcttctaatttcaccctttgtggatttcggctgcggcagcagcgccgcgatatccgactccggccatgaatatgcttcgcacttggtggcgagcgatgcttccaattccgcccgatcagccttggccttcgcatcgtcacgaattacgaacacgccaccgattaccagacccacaacggtgataccgactgccacccaggccagcactcggccttgcaccttgccactcgggcgggtcacgtatacggcgaagcctgagagcagtgccggaatcaccgtggcgaacagcagtccgccccaggatcggccagaaacatccacaaattgggcgagtacgaacaacactccccaaataatggcgaacacagccagcttggaagtcttcttcaccccttgtgcattcggagcaagcacggcaggcgcagcggcaccagcaaaa

SEQ ID NO: 3093 - DNA, 78479 bp, Unknown
  R215_18m  MAG No. k141_1253
gaagctgccatgaagtagttgccgtggttgttatcctgccaagactgaattgcttccttgtcggaatcaagccaattgatgaaggcaagggctgcagcctgcttgtccttagggcaggccgcggaaacactcatcatggagccgacggaagaagacttgaaatcatcggcagaatcaccgaatgcaggtggcagcgttacctgaatcagacccttaagagatggattctgtcccttgtaggagttgccttgccagttctgagaaatataagtggcataggtgccctcattcgtggcgcggttgaacgcatcggtccagcctggagcggcctccatgaccccatcctgaaggcacttttgcaggaattcaatgaactccttggtagtgccagaagtcatgctcaagctgatgtcctcgacagaattgaccttccaagggcgcgcaccagccgaacgcagaaaatccgtaaagcaggagatctcgttattgatgaggacgcccatgtacttgctgggatcttccttgtgaagtttgacgccttcttcatagaattcctgccaagtggttggcaccttgagattatgctcgtcgagaatgtccttacgcacatacatggccaaaggagtggcgtcagtcggcacgccccacaggccaccagcataatgcacctggctccaagcggtctttgcataaagcttgctccacgccttttcgatatcatcgttggcgaaattcagcagagctccagaaatagcgtactgttcgaatcggtcagcactcatctgcacgacatccggaacatctttattggcagcaacgacattctggaacttggtgaaatggtcgcttgccgcgccggtgttggtgaatttaattttgatgtgcgggtacttcttctggaaagcttcaatcggtcctgccatctgcttcccggagaatccccatacgttcagctcgatttttttggaagtatcggtgagagcgttgttaatgtcttctacagtgactgcagttttagtgtccttggcaccagtacttgagccacaagctgcaacgctggctaccatagtaagcgccgccagcgcactgacgattttggtcatcttcttcatgattactcctttgtgtgtcatgaattactgtcttattgttgttcttcaaatggatgtggatgccgcacggtcattagagcaacgaatgggtgatcgccaataaccgtgcggcgaggattcactgcttgactgcaccagccgaaaggccagactgccagtacttctgcaggaacatgaatgcgatgatcaacggggcaactgcaatgaggcatccggtgacaatgtagttgttcggaatctgaccgtccgcggtaccttcggcacccatcttcaaccacatgttcaaaccgaccgtcatcgggtagtcgttggtgtccgagagcatgatcagcggcaggaagtagttgttccagacaccgaccagcgtgaacagcagtacggtgacgaaacctggagacagcagcgggaaggcaaccttccagaagatggtccacgaatttgcaccatcgagcttagccgcttcaaggagagaagtaggcaccgatgtttgcgcataaataatcatcaggtacagtccgaacggcgtggccagctgtggaataatcactgcccatggggtaccaaccagaccaatcttcgagtacatgaggaacagcgggacagagatgaccgtggccggaatggacatgaatgccaaggtgatcgccaacagactattacgtccggggaaccgcattgtggcaatggcgtagcctgcaagtgtggcgatgatagtggcaccaaatccggcgacaactgcatacatcactgtgttaagcaaccaccgtgcgtatgtaccatgctgatatgcaagagtttcctgaacattctgccagaacacattcttgtcatcgaaccacagaccaaaggagctaaacatgccctcgttggtctttgtcgcagagaagaacacccacagcaacggcacgagacagtagatgaccatcaggcccatgataatgtgcagcagccagttaagcacacgctgcttgccggtcagctttggagctgcctcacgctgctgcatacgcttatagcgttggctcgccttgagcgccagcttggcgtctctgcgctgcagcgacttggaacgtggttttgcgattgcttcactcatcacttgttctcccacttattgccaatgaccttcacgaccgcgacaagacccataacgatgacaccaatcaccaaggagaccgctgcagcatagttgaggttctggccgttgaacgcaaggttatatgcgtagagattcggcgtgtagttactggtgatcaccgtcggcgcggaattcatcaagatgctcggttcgttgaacaactgaagcgtgccgatcaccgagaagagcacggtcatcataatggatcccttaatctgcggaatctttaccgaccatgcgatacgcagctcggatgcgccatcgatacgagcggattcgtacagctcgttcggaataccgatcagtgcagaataataaatcagcatgttgtagccaagagaacaccaagtgcagatgtttgcgatggcgaacagcatgagcttttcagaaagcatgttcggcgcagtggccccgatcatagacgcaatctggccgacaaggccatacttgtcgccgtagatatatccccacatcagtgctgcgatgacgcctgggacggcataaggcaggaacagcaggattcgcggcactgcgatatggcggattctctgggaatccagaatgagcgccgccacaagggaaaggatcaaattgagaggaatctgaatcgctgcataaatcagcactcttctgaaaccgctccacagcgcttcatccttaaatgcagctatgaagttgtcgaagcctgcgaatgtggtgccgccaagaagggactgcttgaagaagctgagataaagcgcgtagaacatcgggatgatcatgccgaataggaagaccaccacgtatggaagacaatataacatgcctatgtactcgcgcttcggcttgcgcatcccggaagtatccggtttcgccgttgcatttgtcatagtttttctctttcttcttaacccgtctgaatgagcccgccaacaacatcgttgccattgccgtttcattcatcggtacgttcaatatacaaggttttacaaaaaaagagcaaataaaacttcattgcgcgtggcgaaattttctttatcttgttttttcgccttaaaagggctttattgcaacgatatgcacaaatcgtatttatcgaagaaacagcagccaatccatgtctacaacacccatttccgctatatagacagcaatacgccgataaaaaagctgttttagagtagcgaaaatttcgctactctatatataacgctttttttgcagcgtcgcatacgaaaagagaagagtcatggccacaatcaaaacaacaaacagaccgaaggtctccgacatcgcccaagcggcgggagtatcccccgctaccgtgtccaaggtcatcaacggccgtgatggagtctccgacgagacccgcgatagggtggaactgctcctcgaagaagccggattccgcaaaaaacttcccacaacaaaaaccatacggtcaatcgaactggtcgtcagcgaaatgaccaacaacggcaccgtggaaatggtcaaggagacagcttcatacgccagagattttggcctcggcatcaccgtaagctgcgccggaccggattccggagaatacgcaacaagaaacgaggccagcagctgcctccgtaacgccatcgaacgcaacccactaggcgtcatacttctcttatcgaatatctcatcggccgaggaatcgctgctgcagacgaggaacatcccatatgtgattgtcgatccggtcggccaggtctccgctgacgcattgggagtgggcattgataactggaccgggggaatgctcgccacgcaatatttcatatcattggggcatcgacgaatcgccgtcatcactggccctactaattcacagtcctcgcaggcgcgactgagcggatacatggcggcgctgcagaaaaacggcatcagcgcggatccgcatctcatcaaggttggcgactacgtgtctgacaaggcatacaaggcggcatgcgatctcctggaaatgagggagcaggaccgaccgaccgccatcttcgcgttcaacgatctcggcgcgatcaacgtctatcgcgccgcccgacagcacggcatcagtctgcccgaacaattatcgatcatcggtttcgacgatgtctatcctgcggcaagcatgtgtccatccctgacgaccatcaggcagccattcgacctcatcgccagacaatgcatcaacctgattctcgaagcgcgggaaggaaaggtggaacagaattacttcatttttcccacgcagcttgtcgaacgcgaaagctgcgtatcgccagcacgtccgtaactcagcaacggaacacagaatcagcttccacgaagcacccatgcatatgcaatccgtctctggcacaagcatttacttctgtttaccagatgaaaatacaatatcgtgcgattacggggggcgcagccctagcctcagctggaggtcaggaaggtttcgttgcctcgggtgaagtcgaggacggcaccggcgagttggacctcgtctgccagttcggggtcggcagccagaagctgctcggcacgggtgcgggcgtcggcgatcatgtcggcgtccttgaccacgcgcaggagcttcaggctggacttgccgccggattggacgtcgccaagcacatcgccggcaccgcggaattccaagtcggcttgggcgatttcggcaccgtcgagcgagtggtgaatcacttcgagccgttgctcggccggggagccgggttccgcacgggaaacaaggaacgcccacgagttggtgccgccacgccccacgcggccgcgcagctgatgcaactgagagaggccgtatcggtcggcatcaaagatcacgatgcagctggcctgtttcacatccacaccgacttcgatcaccgtggtggacaccagaatcggagtctcgccgccggcaaaatcggccatgacctgggttttgacgtcatccttgtcgcggccggtcagagtcgcaaaccgaatgccttggaattgcgggagtttctgcaaccggtcggcgatttcggccaccgcatgcaatggcgggcgagccacggtttcgccgttttcgtcgaaggtttcgtaggggtcgtcgatgccgatggcgtcggccgccgcgcgcgttgcacggccgcccgcagctgtgcgggcactggaaccagatgctgcggcgcgtccgcgggcagaaccggctgctgccgaaacgccggaaccgccttcgttcccctcatcatccgcatcaatgcgcgggcacacgatataggcccgctcccccgcgtcgactcgcgcgcgaatgtgcgcgaacatacggcccatggtggcggcgtcggcctcattgaccaccacggtgcgaatcggtttgcggccgccaggcaattcggtgagccaggaaatatcgagatcgccaaaccaagtcatggcggcggtgcgcgggatgggcgtggcggtcatcaccaatagatgcggcgtggtgccgtcatcggttttggcgttgagactttcgcgctgttccacaccgaaccggtgctgctcgtcgattaccaccaaggccaagtgcggggcttggaaggtcttggaaaacgccgcgtgcgtggccacgataatgcccggctcgccactggacgccgcagcaagtgctttacgtcgcgcagcaagcttcatgccgcccgtcaacaacgtgactggaatcgctggcttgagttgctccaccatccggccaatggtttcggcatgctgctcggccagcacctgagtcggggcaacaagcacggcctgatagccggcgtctacggcttggagcatggcagcgagcgccactacggttttgccggagcccacctcgccttgcagcagacgctgcattggccagtcatgagccaaatcggcggcaatatcatgaataacctgctgctgccctgcagtgagggagaacggcagggatgcgatgaactgatcgcgcagactgtcggttaccaacgggcaagagtgagccgcggatttatgggcgtgcgacctggctttaagcagcgaggtctgcgaaacgaaagcctcctcatagcgcagggtttcgatggcctccttgaaccgggtcgtggaggccggatcatgaatggccaggaacgcctcagcccgatgcatgaggttcttggccttgcgcaccgattcgggcagcacatctggaatggattgggagagcgcctcagcaccggattcggcggtcgtgccggaattctcttccccgttttggacggcgatggtgtcggtcgtgggagccacaatgccggctgacccagcgccagcgagttgcccgtcaggcgtggatgacgtgcgggcccccatcatccacagcaatcccagaatcgtctcatgaatatgttcggatgaaatacgcgaactggcgtgatataccgggcggggccggcagacgcgggtaagcgcctcttgcacggtatcggcgtcgtatttcagcgcggccccggaagaggcagccgcggccggcggatacgcggactgcacactggcatacggatcggtacttcccgcaaacgcaccattgccggatgccgcaccccgagcgtaaccctcaagccccgctcctgctccggccgacccgggcgcgacagtgaggatttcggggtgcgtgaattgcagctgccccatgtattcgctgggcataccggagaccaccacagacgtgccggcgcgcagccgcatgctgacccaatccacatacgatttacgatacgaaaagaacgtgagccgggccgtgctgccgggtacgcgacgagaccgggcgaagtcggcgtcatcgaccgtcgcctcgagtcggtagccgcggcgagcgttcatcggcaccacgcgcatgtctcgtatcacggcggcaaatgccatctgctggccgggtgcggcctcgcggatggcgcgaagcggcaccggttcggtgacgcggaagggatagtaggtcagggcgtcgccgacagtgacgattcccagcgatttgagcgcggacacgcgacgcttgttggtgaccagcgaagcgagagtggtgtccatagtgatgctcatattggcctattctattcgcacggcctctttaggccgcagaaacaacaaaacccgctgagccgaagctcaaacgggttttgctccacgttagtacgcgattcacgcggccacgcgctgaaccttgccggccttgaggcacttgacgcacacgcgcagacgagtgttctcgccatcaatcgtggtgcgtacagactgcaggttcgggcggaagctacgcttggtacgacggtgcgaatgggaaacggtgaaaccggtctgcggtcccttgccgcacactgcgcaacgagctgccatgatggactcccttaaccttgatgtgtcaagtctttcacgcattcgaccgccggtttcacccgacatgccgaacacacaacttcacaaatatatagcccaataccgacaaccgcaactcttgcgtgtatcatgggcgaacttcggcggttcgcgagcggttcgagcgtaacttgcgagtgggccatcagcggttcgcgagcggttcggcattggttcgccagcggtccgcaagtagttcgccagcagttcgccagcagttcgccagcggcgaattacgctgcaaatcgtagcgtttacccgataaaacacgccggactgcctattccgcatccaacaaactctcatataatctcggtataagagacggcaagggacgaaggggtcctcgtgcaacttacgacgaaggaggctgtcatgttgaatctcaggcgaggtatcggcactcacgagcccagcgtgatttcactgggtcaagtctgggtggacatcatgctcaatgtggacgaggtgccggcacagggcggattcgccgtggccgatcatccgaagccctccattggcggcagctatcgcgtactgcaggcggccagccgcatgggcgtgccgaccgagcacgccggcattctgggcaacggcctgtgggcgcatttcatccgccagtcattccaggacaacggcattacgcatatcggccaggatcgtcttgatgaggattccggtttccgcgtggtgctgagctccggcgcgccgaagaagacgttcatcgcttcctatggcgccgaggctcatggcgacgcggacacgttcaacacgctggagccgcagcccaaagacgtggtgcacatcagcggcaacacactgatggaccacacggccaccggcgtggacggattcctactcaaggccggtaccgacccggctgcacgcgactacacgctggtgatcaatcccaccaatacgttgcgtctggtcaatgaccacatgctcgaggatctggtgcttgcgcgcccggtctggtcctgcaaccgtcaggaggccatgacgctggccgagcgcctgggcgcgccgatcgacgacagcaaggtcaccatcggcggtggactcgacgacttcatgcaccagttgtgtgacggcttgggcactacactgcgcgcgccgctggtggtgcgtgtcggcgcccgcggcgcttggattcgtgagccaggtggcgagacgattcatatcgagggatacccgaccaaggccgtacacacccgttcggcgggcggttgccacaccggcgtgatgtgcgcgatgctggcaaagggccatagtctggccgaatcggtaaagatcgccaacgcggcggcatccatcgccatccagcgtagcctcaacggcgtgccgcaatgccccgattacgacgaggccatcgcgctgatcggcgaatagtttccggacgattgagtggatttcctcatctgggggaatccacgatcggctcccttcagtccgcttcgcggccagctcccctcagcgaggggatctatttttttgctctggctccccttagaaaggggcccggcattattcacccgccgttcaactttggcggttttctaccctagtccgcgcttctacgatagattgagttgaatactgtcgaggagtgcatatgactgatcccgcaaatgtccacgaaccggtgccgcaaagcgccaaactgaccgcccgcgagaagaagtggatcatctacgacgtcggcaactcggcattcgtgctgctgtccaccgccgtcatccccatttacgccaaatcgctgatgccggcggacggcaacatcgtgtccgcctggggctacgcgcaaaccattgcctccttggtcatcgcgctgctcatgccgttgctcggctccatcgccgacgtgcaaggcatgaaaatcaagttcttcctgggcttcttcggcaccggcgtggtcacctgctgcgcaatggccttgcccctgacctggctgccgttcctggtcgtctacattctggcgaccatcggcctcaacggctcgctgacgttctatgattcgatgctcatcgacaccacctcgaacgagcgcatggacaaggtctcctcgcacggctacggctggggctacatcggctccaccgtgccgttcatcttctgcatcgcgctgattttcggcggcccgtcgctcttcggctggtccacggtggcttgcacgcgcgcctcgttcatcatcaccgccatctggtgggtggcgttcaccatcccgctgcttaccagctaccgccaggtgcactaccgtgccacccgcgaccagctgggctcggccgtgcgcggcacgttcagcgaactggcgggcacgttcggcaaaatcgtgaagaacaagccgttgtggatgttcatgatcgcgttcttcttctacatcgacgccgtgaacacggtgatttcgatgagtacctcctacggtgccgagcttggcatcgactccacccagctggtggtggcactgctcgtcacgcagttcgtggccttcccctgcgcgattctctacggccgtctggcggcgcgattcggctgcaaggcgatgatcacggcggcggtcgtggcatacatgtgcatcgtgctcttcgccgcgttcttcatgaaatcggccgtggagttctggattctggcgattctggtcggcatgttccaaggcggtatccaggcgctctcccgctcgtactacggcaagatcatccccaaggaccacgccaacgagtactacggcttctacgatatcttcggcaagaccgcctcaatcatcggcaccttcctggtggccaccaccacgtccctgaccggcaacgcctcgttcggcgtgctgtccatcgccgtcctgctcgttgtggcgctcatcttcctgctcctgcagaaggacccgacgcgggagtgatttgccggccctcggcaactctgcgccgcgggcgacatctcgcaacccctgcaacgggccctaatagcaatggaccatcgccacttgatcacttacgctcgcgataatccttgatcagctgaatggcgacggccgcaacgccgcacagcacaccgccaatcggccacggcagccagaacatcgccccgtccgcggcgctcgacccgacggccgaccaatcgccgcgcaatgccgcagggttcaaaaacagcaggcacaagccagtcgccgtggctatcagcataatgatgccgcacaccgcgccggtcagtctggcatagaaatcctgttcgcccgcatgctccttgcggtcgtcctcggccgctttgttgtatgcgtcgatattgagcagactgtatctcatgccgcagtagacaaacccgaaaacaccgggcgcacagagcagcagaaaaattgcgttgggccagccatcggagacgccgagcatgtcatcggcatacaccgtcaccgcaatgccaatcagaatagccgagatgccaccgacgatgccgattaccagcagccgcaattctcggctgcggtcctccccggtgtagaaatcttctacgtatgggtgacgccgtttgaagtcaatacgcgacagacctcctggaatcagcatcgccagccccgcaatcacacccacacagacgcacagaaacgtcagaaaatcgttgagcggcgtcgctccgagaatggaattgctggaatcgaacaggttgccgatgccaaccccggcgacaatcgcagcaacaccgccggcaatcagcagcgcgaatcggcggcgatgttcatcgtagccagtgatatcctgcgcaagctccgcgataggagtgattatgcccgccgttttggaagaagcggctaaaggcgatgccgtctcagccgaggagtcaacattcgacgaaccggccgcagaagccgacgcggcaggccgactcacatcgccaagtaccagatcatcaagcgtgcagccgaacaggtcgcagatcataagcagcttgtccatctcgggataggccttttcggattcccatttcgaaatggcctgacgcgagacgccaagcaacatggccaatcgttcctgggtcaggttgcgttgcgcacgtaggtactgcaggttagcgcgaaaactcattggaatgtcccttcatacgtaatctttatcatgtcatgttcggccgatgggctcactatggcatgccgtccatgtcacccgccaccatctttgggttgcaatcgccggttattcgagcgcaaccacaagttgcatcggcggaattccgccattccgttgacctgagcagctttaacatcgcactccacgagaccgaagcttttccagccatgcgagggcagcttgtctcacctgccaccacgaatccgcttcgacccacgtacacatctgtgtacagcagcgctcgcaatcggttacctacgacccatatgatttgctgagcgaccgcaaaacacgcaatagccgagacaacaccgtcagcgttaaagcttaaggcgactacttgcccaatagtccggaaatctggctgatgatgtcagcgggcagtcctgcttgttcggcaatggatccgaggtccagattggcaccctgctcctgaattgcgccagcgacctgactgatctggttggcggagatgttttcctccgccagcgcctgcagctcgtcaagtcggtcggcgttcaaatggtcgccaacgacctgttgatttcacccaactgatcggcattgaaatgctcaccgattaccgccggcaaatcaccaatcgaaccgagattgaaatccccgccaagcacattgcctagattgtctgcggcaaaatttttcaggctatcgaacagtcccacatgtgccgctggtactgcttgttcagcaactgctgcagagcatcgcacagaccctgcatcaatcgccgctcttcggcagacaagtcccgcgtgaaaccaatctctgcctttgcgctcatcagctggggagctcacggtcacactcatgcgtcgcagaccacgagcctcacgcgcctcctcattccacatctgtgttaacaacatgtgttaatcgcatgcatcgccaccatgattccccaatgatttcaagggttccccggtctcactattgtttcttccctaaaacggcctcaatcatcggcaccttcctggtagccaccaccacgtccctgaccggcaacgcctcgttcggcgtgctgcccatcgccgtcctgctcgtcgcggcgctcgttttcctgctgctccagaaggatccgacgcgcgcaaacgtgccgagacatcgccggtgaaccaagttctgcctttttaccgacgccagctcgcataagcaggaatcaaacgtcggcgctgggacacagaacgggaatccgccgacgttcagagtatctgatgtcggtgccgggccatgttttggacgccaccgacacaagtaccactcttggcgacggtggtgcggcatccgctgtcccaccaccgtcgccaatcgttctcagcggcgttgacaatccattatctgtcctttcaacgccgccaaacgtccacagcgtcggcgacggtccggattttgacgcaccaccgatgcaaaaccattgcaggctccgtacggaacatcagccgcgaccaccgaacgagcaccagatgcggcatcagccgcgacaccagccgcacttatcgacgcgcccttaccgcgtcatcacgtccatcaatacaatgactcatcggcatatccggctgcaacccaataatcgtcggccgatagcgagcgattgaaaccggtggcatgatcgcttccgaggtcgccctcgccaccgaaatcgacatcgaaatcagtaccagcatcggaagtaccgccggacataccggcaacggacccgacttcggttttcagcaggtatttctccgcgaaattcagcgtggtgcacaccatcgcaaacccctttccatgcgcgttgccctggcggaccaagacgtccttgtgtaagtaagtaagtatggcggctccccttccgcaccgccatatccactatggaagcacgccgcggcacacgacacaagccccgggacatatgaagaagttatggccggttcaaagcacccgtattacagcccaaacggcaccgcgcgcagcgggattgcacgacggccggacgccactcataatcggaaaccgctcacagccaaatgccacccgaggccggacgccatataaggaaccgtggcacggcagatatagaaaatgcccgccatcatagactgacgagcgtgatatcgggtgggcgatgtaggaatcgaacctacgaccccttcggtgtgaacgaagtgcgctagccgctgcgccaatcgcccgagcttgtgatgaaaaaaccggcaacattctgccggcgattcatcgagtgggcgatacaagattcgaacttgtgaccccttccgtgtcagggaagtgcgctaccactgcgccaaccgcccaggtcatcctcaggctgaatcaatcatcctgaaccagccatccgagagcggacaacgggactcgaacccgcggtctcaaccttggcaaggttgcgctttaccaactaagctatgtccgcatgtgttaccttcacgggcaacaggtgacaaagatacgccaatctcaggaaaaagccaagcccccgcgtgtcccaccggttttccaacgattatcgggtgccgccgtgcacataactcgcggtggccgtatacagcagccaggcgatgggcatggccagcataaacagcgggtagaaccaagcgatgggcacattgcacggccatggccgtggaaatcaggaacgcatgacgataaccgatcagctggccgaagaggccaaggccctgatcggcgaccgtgccgaagtgaagttcctgaactacgccgacgtgccgttcttcaaccaggacgaggaattcccgaacccgacagccgccgtggccgccgccttcctggcgctcgttgcggagtaatcccgcctgaatcttggttacgttccgcctcaaggcggacggcggaccagctgcatcagcaatgtgccgaacccctctgatcgactccaatcagaggggtcgctgcgtttcaaggggctgatttggccttctccggaggtctactcccgtttcaaggggctggtggctgagtagacacgggccaaaaacggcgtaatgacgttagcccggagccgtttatacttgtggtttcccggatgaggagcccctcgaaacggagatagacctccggaacagcccaaatcagcccctcgaaacggagttagacggttgggatgtcggaaagaacactcatgccggcccaagaacccccactatgtcagatatcgctgcccagcacgcaatactgaccgtacagcacgacccgtccttcatgaaatcaggcacggtatgggcttcatccctcaacgcgcgataatggcggtatgacgcaacgacaactgatgcgggccacagtcgaaacgcccatcggccggatgatgatggcctcggacggcgagggacttaccgagctctgtcttgaagactggtggtgggccaccgatcaccaagccgttctcgattcgaatcgcgaatccgatcgtgaacccgatgtgttccgtatgacccgcgtatggctgaccgcctatttcgccggcgagcgccccggcctagatcagacgccgccgttgcatcccgccggcacgccattccaacatgaagtgtggaatctggtggccgaaattccctatggcatgacggtaagttacggcgaactcgccgccgaattggccgaacgacgcggtggcggccacatggccgcgcaggcggtcggaggcgcagtgaagcgcaatccggttaccatcatcgtgccctgtcaccgcgtagtcggctcgggccgcgcgtttggcggctacggcggccgactcgacatcaaggccgaactgctcgaccacgaaggcgtggatctggcccgcttcaatctgccgaacctttgacggccccagcggtccgcctcgtcaaaaggattgagtggttacctctcccgccggcgggaagtggcacgtaacgccggagggtggtcggctggctggcatcgcaacccccgctacccgacaattttcgacaagctgacgggaatcctcccacgaattgttcgccgtcggtgcagtcttgctcgatcgcgccggccaaaaccgtacaatccctacaatggaatgtatatggttaattgctgcgcgcagccgcacggccgcacgcaatcgcaagaccacatggcccaaggggatatgcaatatcaacggaagcaggaggtgcgtatgaccggcattatcgattacgcgcacaccgaaacgcgctccttcgccgacttgccgttcaatgaaatcgacgccttgatcatctccacgctcatctatgaggatgtggccagtatctgtccgacgttgatgctggatgagacgcagtcaggctcgttcgccgcacgcattcgcgctttcgagcccaagcatccactgatctggctgaagggtatctggcatcccgagcttgaatcggtaagccttgacgaggccaaccgcgagctgcatcgttcgccggaaacgcatgccgacgacaagccgcacgaagcccaaatggtttcagtggtcaatccggacctgacccacgacctgttccaggccgcaggcgagaacccccgctacgccaacgttcgcctgggcgcggtggtcgagcacatcaatcagggcgagcaaacccaattcgccgccgccaccttccaactgcccgacggccacaagcgccggaagccgacctacaaaggcacgttggttatttccttccgcggtaccgatgattcgctcatcggatggaaggaagatttcaatatggctttccagtatccggtgccggcgcaacgttcagccagcgcctatctggatacggtggcgcgactgtgggagggtccgattattctggtcggccattccaagggaggcaatctggcgatttacgcggccatgaacgccgaccccaaggtgcgcaagcgcattcagcatgtctattcactggacggccccggtttcccgccggagattgtgaccagccccgcctaccgcaccatccagccgaaggtgacgaaaatcgtgccaagttcgtcgattgtgggcatgattttcgagaccccggagccttgccgcgtggtctcttccgattcggatggtattatgcagcattccgccttcacctggctattggatggcgaccagttcatcaccgagccggatttgagttccagctcgcagttgtttaacgaggagctgaaccattggatcgccacgcttacgcccgaacagcgcgagcgtgcggtggacgcgctgttcaccgtgctgcacgccaacggcgccaccagcttcagcgaggtgatgagcaacttccccgcttcgattccggcgatgcttggcgcgtatgtagggctgacccccgcagaccggcgtcatttggttgaggccctggcgatactgttcaaggcgtccacggccaaacgcaggccgacgccagccccagcttccgcaccaagttctgcgaccgccgaaggaacagccgagaccccagcaggaaccgcgacaggaacagatagagcggccccggccagagccgataccgatgccgatgccggcaccgcagcttcgccctcagcggaggacgcaactgaaatcgccggttagctcatagacatgtccacaaataatagttatactgcccaataagttattagacagcgtgaccatatcacgctggtgcatcaggaggaagagatgccacgtccacgccatgattccgaggtgctgcccgccaaagaacgcctagagaacgctttctgggaattgctcgccgaccgcgactatcgcaagatcaccgtcaccgatgtggtgcgtgaggctggcgtgaaccgtaattcgttctattatcacttttccagcctgcccgaattggccgattcagccattctgcatcaggtcgaatcgattccgatcaaccgcacccccgaccccaatggcaatcccgaggaacaatggcgagaccgcgtcaccgccacgctctccgatccagagcaacggcaacgcctcgaccgcctggccctgttggcaggcccgcacagcacgcttgaactgaccgaatcgctgcgcgacttctgccgtctgcaaatgctcagcacattgcaacgcgaccccaagaaccttgacctgaaaaccgatctcatggtcgagttcaccgtgggcggcatgctcgccgtgctgcaacgttggcccgaattgagcgacgccatcgaaatcaaagacctgcttaaagaagatgtggccgtgctggccatgggcatatacctggccatgagccaaaaggacatgctcaattactggaatcgcatcttcgtgcacaatgcgcaggattcggccgcccccggcatgcaggccaccgccacgcatgccgcgccatcccccatctcaccgtcgaacggccccgcaggattccccgggtacaccgcttgaccgaaaaccagtgagtctggattgtttccgtcgaatgaacccccgcgtgaggtttctcacaaggcgcaatcagcctctcatgctggcgtttccagccctcacacaggaagatggaagcatgagcgaaacatcgaacaaaacccgtctggaacatgactgcatcggccagatggaggtgccggcgaacgtctactggggcattcacacccagcgcgctatcggcaacttcccggtctccggcatcaccgatagccaacatcccgagctgattcgcgcctatgccacggtcaagcgcgcctgcgccatcgccaatgaggaattaggcctgatcgacccggccaaggccgaggccattcgcgccgcctgcctggaaatcgaggccggcaaactggccgatcagttcccggtcgatgtgatgcagggcggtgccggcacctcgtcgaacatgaacatgaacgaggtgatcgccaaccgtgcgctggaaatcgccggccaccagcgcggcgattacacatacatccatccgaacgacgacgtcaacgagtcgcagtccacgaacgacacctacccggccgcctgcaaactcgcgcttatcgacgcgatcgggccgctcgccgagtccaccaagaaactcgccaaggccttccacgatctggccgacaaacatatcaacgacgtgacgattggccgcacgcagctgcaggacgccgtaccaatgacctatggtcaggaattccatgcgtttgccacgctgttgaagtctgatttggctgcattcgatcgcgtggtgccgctgctggcccagctcaacctcggtgccaccgccatcggcaccggcatttgcgcggatctgcgattccgcaagtccgccatcaagcatctggcgcagatcaccggcttgccggtcaccgccgcgcccgatccggtggccgccatgacggatatgggcgcgtacgtggccacgtcggccgccatcaagagccttgccgtgcacctgaagaaggccgccgacgatttgcgactgctcaattccgggccgcgctgcggtttcaacgatctcaacgtgccggctcgccaggccggatcatcgatcatgccggccaaagtgaacccggtgatccccgaatgcgtcaaccagtgctgcttcacgatcttcggcatggacgtgactgtgaactgggctgtggccgagggccagttgcagctgaacgccttcgacccggtgatggtgcatgagctgctgaccggcatggcgttactgacgcgggccatggagacgttccgcgtcaactgcgtggaaggcatcgaaatcaatgctgacctggggcgttcatatgcccagtcctcaccgtcgatttccgccgcgctcaaccattacatcggctacgagcacgcggccgacatcgccgccgaagccgtgcacaccggccgtaccgtgcgcgaggtggccggcgaacgcaccgacctgcccgccgagcagctggacgagattctcgatccgattcgactggcccgtggcctcggccagacctgccgcgagcaccgggactaggcgtcacggcgacgtcatcaccacgacgatgctgcaccgcggtgccgcggtggtgccggtggtgccgacggcacgccaccggtatcgcaccatcggcaccaccgcaacggccaaaacccgacgtgggcccgcatgtttacgacttcaccagaaatggtcgatacagtagggcatatgaccgaatatgcacaagacatcgcacactggttccaagtcaatgcgggcaaactcatctggctggccattgtattggccatcgtatttgtggccgaccgcgtgatcagccgcgtgctgcgcagggttctggatagttcgcagattcccagcgcctcgattttcgtgaatctcacgcgcgtgaccatctgggtcaccggtacggcgatggtgctgcaaccggtgttcggcatcaatccgaccaccctggtcaccgccctcggcgtcggaggcgtggcgatttcactgggtttgaaggatacgatcgccaacgtcatcggcggcttcggcctgatgctgggccgcgtaatccaacccggcgatctggtgaccattcaaggcgtcacaggtaccgtgcacgacatcacctggcgacagaccgtggtgcgcacccgttccggagacatgatggtcatccccaattcagtactcaataccgccgccctgaccaagctcacgccggtcagcgaaggcatggccacgcttgaattcacggccaaggcctccggtgacccgtccgctatcagtcaggatattctcgaccgcgtaaccaaagccaccgccgacgtggcactggagggccagccaccgctggtcaagttcaccggcttctccccttacggcatgaccggtcaggtgctggtgttcgcgcgcgagggtgtgctgccctccaccgtgagggatatggccgcgcgcgccatcgccggttcgggcactaaataccttgtcgaagatggcggctcgtcagacaatctgtgatatctcccggctcgcctctctgggtccggctatgacagtcatgcgaacagcatccaaccggtaagaatcacagtcaacagtaggtacgagataacgccgggattggcataggcggtgcgtattttaagccccgcaggcaactcctctggcgcaagatagaactcccagctcttgcgcttggtgataagcagcacgataccggcaatgcagaggcccaacatcactgtgccgtacaacatcatgatgcccatgccgcccatgttgccggtttcaaccatacgcatgatttcggcctcgctgattgtgccgtcgaggatgcggggatcgatctgttgtatcaccaatggggcgagcactgccccgttcaggttgatcagcatgtgcatagccactgaataccgcaggcgggaggtgcgtgtgtatacatatccgaacatcagtcctaggccaaaggcgtagaagaactggaacacgttcatatggaatagcgcgaacgccaatgcggagaacatgattgcggtcttttctccgtaccggcgcaggcgggagataatctccttgcgaaaaatccattcttcgcaaaccggtgccaacaggcctatgaacaatgcgttcacccgccagtcgctgccaagaatcacgtcgttgatgcgattggtggcctgaccatcagtggctccggcagacaatatattgccgatcatattgcccaagagcattaccggaatgcacatgacgaaaatccgaatgaactcccccgccttcatggggtactgccgggtgcgaataaccggtacgcgagtgaaggccaacatactcagcggcatggccaccacatacagcggcccggaggaggcgagcagcacagcccaagcgggcacatcggcgccaagcagcgttcgtagtgcttcagtggccagaatattcagcccgatccagaacaccatcataatggcgagcgccgagccgattgtcgaaaaccggcgatgggccgtgaaccaccaatcgcgtggggtttgttgcggctgctgtggttgctcaggtacctgcggctgctgcgccgacggcattggttcgctcatacttatcccccatagtcactggccgcaaacggaccgatcacacgtgcaatactcttcaagaatacggcacggcgtttcgattgcattgggaatggggaaaatcatcaatgggcaaggaatgatcaacgtcaatcaatccccatgccgagagagtcctctactctgcgggattgttgtgggacggcacgcgattttgcccgattttttcgcggcggcccacaccactccacatatgactgatgacgccgcacgaagaaatggcgtcattgcaacgattcctcaatacaatctgtgggacggcacgaatgtacatcgtttgacgttcatgccgtcccacaccggcgtgggacggcacgcgataatcgcccaaaaatcgccgccgtcccacacatatcattgcagataagccattcgacgatcgtacagtcacaaaacagaacagaaccgcacgatcatcgcaacgccattcagcaggcgagcgcggcgaccggacgcggggcgacaatcacgtcatcgcccaccgccagaccggccggcagctcgctggcgggcagctgcacggtggccttgagctgttcacctttgttccagcgctggtattcgccggaggtgatgaccgtgtccacacgaaccaaagagccaaggaagtgaatgacctccacgcgggcgcgttcgccgacgtgcgaatcgctgctgccagccaaggccagcatcaggttctccgggcgcacgagcacggccacggaatcgcccttggcggagccggcgagcagcggcacgcgctggccgaagaccacggcctcgtcgccattggatgcgccgagcaggcggttggtgagtccaatgaacgtggccacgtactcggtggcagggcgctggtacaggtcctgcggggcggcgatctgctcgatcttgcccttgttcatcacgccgatgcggtcggccacggccagcgcctcttcctgatcgtgggtcacgaagacggttgtggtgccggtggtgagttggatgcggcgaatctggtcacgcagctggacgcgcactttggcgtcgagcgtggacaacggctcgtcgagcagcagcacgcgcggcttgatggccagcgcccgggccagggccacgcgctgctgctggccgccggacatctgctgcgtgtacttcttggcctgatcggcaagccccacgagctccagctgttccatggcgatcttgcggcgttcggccttgcccatgccgcgcacttcgaggccgaattccacgttctccagggcggtcatgtgcgggaacagcgagtacgcctggaacaccatggccatctcgcgcttgttcaccggcacactggtgacgtcctgtccgccgaccatgatgcgtccgccttggatgtcttcgagaccggcaagcgatcgcagcgcggtggacttgccgcaaccggatccaccgagcagcacgaccatttcgccgggcttgatgtccaggttgaagtcgtcgagcgcgtgaacggtggagccgggatagatcttgacgacgttctgcatctgaatggaaccaccgccgcgcttggcggtgtctttgagcagggccttggcggccttggtcacgtccttgccgcgcacgccctcgagggtagcggtgggatcgttcttgaaggcgtcctcggcagtggaggacacggctgccgggatggccggggacgccggggcggcgtccactgcggtaccggtttcctgacgggtgggagttgaatcgttgttcatcgggtcacttaccttcccttgacttacgcattgcgtcggagatcaggtcgagcgcaacgaggagcaccacgccgaagagcagagccagcagcgacatggcggtggaaatttgggcattggattggccgagctggtagagcgcgacctgcaggttcatacggccgagcagcgaggcgacggtgtattcaccgagtaccacggcgatggagatgaaggatgccgagaggatcgactgccacaggttcgggatgatcaccttgaagaacactttgggccaggaggcgccgagcgatcgggaggcttcgaccaacgtcttgacgtcgatggagttgaggcccacggcgatcgcgcggaaggcgaacggcatcacgagaatcacataggcgaagcacagccagatcgggttggtgctcaacacgtcggcggaaagccaacggtagatcggcccaagacccaccaccagcacgatggccggaatggtcagcggcagcgtggccacccattcgattgcacgctccaaggctttggagcgaatatgcacgatgaccatggtgggcaccagcaggatgagcatgatcacgacggtgacggcgctcaacgacagcgagatgccgacgccctgccatagcacgctcagatcggcgcccaacgattcgccgttgccggtgaaaatcgccgtccacggcgcggccgaccagcgaccggacaacgggtgacgcagggtgaagatgaacatggccagcagcggcacgaacaggaacgccagggtgacgaacaggatcacgaatttgatgatgctctgtttgcgcacgcgggcggcacgcagctgcggcggcttggttgtggaagtttcggtcattgccaacgtccggccctcttttccacggcgtggctcagcagcatgacgatggccacgacgatgatcattgcgaatgccagcacctgcgcgaagccctgctggttggggtccatctcattgcgcatggcaccttggatcatcaacggcaccagaatcgagcgctgcgagaacagggctgcggcggtcgcgtatgcggagaacgcggaggcgaacaacagcaggaacgccgagatgaagcggggtgcgaggatcgggcaggccacgcgcgtccagtattggacggtgttgccgccgagcgactcgcaggcttcgcgccactgtggacgaatggaatcgaccgcaggcaggaagatgatgatcatcagcggaatctggaagtagcagtagacggtcaccagccccggcagggagctgagccaattcgggttcacggtatagccagtcagggttttgatgagcatggtgccgatgccgttgatgccaagagtggcgatgaacgcgaacgcgagcatcacgccgccgaactgggcgagcaccgatgagatggcggcgaccatacggcgcagcggtccgttcggcttggcgccgatcaccagcgcgtaggaggcgagcgcgcccaccacggcaccgatcagggatgaggccacggacaccaggattgacgtgccgaacgcggcgatggtgttggcttcgaacatcttgtggaagttcgcaagcgtgaaaccgccgctgcgatcctggaacgcgccgatgatcacgatcacggtgggtgccagcaggaagcaggcggtgtaggcgaagaacgggagcgtggtggcgagcgtgccaagctcctgacggtgcttcgccagtgcggacgaagcgggggtcgatgcggcggacggacccgcggccttggaggcggcgggtccgttcggtgcgatgggtgcgattgcggcggtcatcgtggactctcagttgccgatcgtcttgtcccagttgttttgaagccactcggtgatgcgggtggagtcatcgttgctgtaggtgaccggctggccttcgatggtgatggcgtccttcagggtggcctggtcgacggtgccgtcggccttcatggagtcgagcagcaccgggttggcgccgcccttgaaccacaggttctgggtttcggcggtgtacaggtattcctcccacaggcgtgcggcggcggggtgcggcgcgtccttgttgatggcctggttgtagtagctgacgacctgggctttggggaaggtcttgtacttccagttcacgcccttggacttgagttccttcttgtaggaggcctggttgtaggtccagtcgaagaccacgccggtctggccggagtcgatggtgccgttggtcacatcgatggtgttcaggttgccggcttccttgagcttcttgaagaagtcgagaccgggctgcaggttgttgatgtcgccgccggcgagctggttgaccatcagatagccgttgaaggccgcgccggcctcggtaggcttgccgttcagggacacggtgccggcgaacttcggatcgagcaggtcgttcagggaggcgacatcgccgtacttgtcggcgttccagcccacggacatgatgccggtgtagtcggcgtagtaggcgccgtcgacgttcttggcagcatcagggatcttgttccaggcctgcaccttgtacggggcgaaatagtcggtggaggtggcggcgatggcctggccgacgtcgaagacatcgggggcggcgtcggtacccttgttggtcttggcggcgtcgatctcctccttggaggaggcgttcgggttcagctcggtgatcttgatctccgggtacttcttcttgaagccctcgatgacctcgccgtagttggaccaatcatgcggcaaggcgatgacgttcagcgcgccctcttccttggcggccgattccgcaccacacttacctcagcacgccctcaatcaatcgcgtgatgagttcggtgtagctcactccggtggcatcccaagccttgggatacatagaaatcggcgtgaagccgggcatggtgttgatttcgttgaccatcaccgtgccatcaggcgtcacgaaggtgtccacacggctcaagccggcaccatccacggccttgaacgcgcgacgggccacgtcacgcacgtcctcaagcacgctgaccggcagattggccggcacttccacgtggctggcggaggcatccatgtacttggagtcgaaatcgtagaactggtcgtcgttctgatgatcgagcacgatttcgccgggccagctggcctcgggctcgtcaccggccttcgggcacagcacggcacattcgatttcgcgaccatcaatcccctgttcgacgagcaccttccaatcgtgctcgccggcggtggcgatggcggcggccagacgatcctgctgggtctcgcggtcatcggctttctcgaccttggtcacaccgaagctggagcctgcgcgcgaaggcttgatgaacagcggataggtaagaccggcgtcctcgatcttggcaagcacatcggcggcggtgaagttgcgcgcatcgaccgtcacacccggcgcggtgggaatgccggcggcacccagcaccaccttggtgtaatgcttatccatgcaggcggcggaagcaaacactccgcaccccacgtacggcacacccatcatttccagcaggccttgaaccgtgccgtcctcgccataggggccgtgcagcaccggcagtaccgcgtccacatggccaagggaggtcagcgcatggtgcatttccgggtcggacatgctgacgaagctggtgccgaagccggaatcggcggaattgatgcggctgggctcgccgatgaagaaaccgtcctggccgcgagaggggtcaagcatcaccgggcgcgatcccggggtgatctttacggtcggcagctcgccgccatccaagttccagccacgaggatcttcgccgttgatgatccacttgccgtccttggtgatgccgaccggaatcggctcgaaccgttcagtgtccatggcccccagcacaccggcagtggagatgcaggaaatcgaatgctcgtctgcacgcccaccatagagcaccacaacacgcttcttggccataaccatccttttattgaaactacaaccgttttcaagcctatgctttgcaccgccaaccggaccgaaccgcgctcggaccgccgcgcacaagagacgcacaccagtctactcgcgcacgtcaacgacgtatacgccacacgactttgcacgtacaacgtatacgccacgtgtacgtcgcttctctcgttattcgccggtaacctcgtgcccgaacagtccggcaagcatctccgagcaggaaatgccttcgttcagcacgcggctcatctgatacgccaatggggtcggcacatcaagctgctcgccaagagccaccaccgcatccgtggtgggcacgccttcggccacaccgttgctgaccttggtggcctcctcgaccgtcaatcccttgccgagattcgcgccgaacgtatagttacgagacagcggagagccacaggtggcgatgagatcacccacaccggccaagccgaagaaggtcttgggatcggcgccagcggctacgcccagtgcggtcagttcggccagtccacgagtttcgatcatggctgcggtgttctcaccgtagccggcaccacgggccatgcccacggccagcgcggtcacgttcttcaggctgccgcacatttccaggccgatgacgtcggtggtcacgaacggcttgaaataggaggtggtacatgcctcggccaccttcgtggcattatcgaggttcgtacaagccaccacggtggcggcaggatgacgatcggcgatttccttggacaggttcggtccggaaatggcggcgaaccggtcggccggcaggtcaagggattcgcggacgacttcgtccatacgcttgttggtgccacgctcgatgcccttcatcaggctgacgacgatggcgtgatcgggaatcagtcccttgaattcgatgagtgccactcgcgcgaactgcgcggcgatggccacaaccacgatgtccgcgttcttgacggcttcggcgcgatccccggtggcggtcatgttgtccggcaacttttcgacggacggcaggcgcacggcgttgtggtggcgatcgcgaatgccctcgacaatccgctgctccttggcccacatggtcaccatgttgccggcgtccgccagcacttggccgaaagcggtaccccatgctcctgcaccgagaaccgttatatttttacccatatcagattcctaccttcgcttgtcgcgcaacttcatcggtacaatcttgtgccatgctactcgcctaggctccccgtacgggaaccggtgcggctacttctcagccgggaacgggccgccggcttcaggccaaggcttgcgactcatgctgcggtagtcccagtagccttcagcggggaactgttcgccacgaatttcctccagtactgtgttcatgcgtttgagcacgcgccacatcagctcgttcacggcctcggcaggcggttcttcaccccatgagtccatgtcggcaagcagatcggagtaatcgagcgcatggtcatagcacatcaccacgtttttgcgcggccatggccaccagtggttgatggaggcggcaccccacgtcaccgccgggtacagcggcacctgatgccccagtctgcgcgaggattcaagggcgatatatcccacgccctccttaatgctcatcacccactttttcgggtcgcgggtcacggtgccttccggccagaccgtcagcgggcggccggacgtcagaatatcaatcgaggtctcttcgatctgcttggccttgcccgaatgacgctgcaccggctgcatgccgaccaaccggaaccacttgccgatcaatggccacttcgccatctcggccttggccatgtaccgggggcggcggcccatgtggaacaggctcatcatcggcacgaacacatcaaacatggtgatatgactggcggcggtgatgaacggtccggtttccggcacctgttccaagccccaggccttggtcttgcagctggcgcggaacacaatggacacccctcccagcagtcgtttggtggccttgggattctgggcgtcgatttccggctgattgggcgtgcgagggccggtcgggtaatactgtgtcgagtccacaagcgtgtggcgggcggccagacgcttgacctgctcatcactcagcgggcttacggccgaacgcggcgacggttttcctttggatgccatggtctctattgtggcacggaccaccgcccaacgattccagcgcaacgttcccgggaacgtgtcgcggaaccacacctcgcacccccgcccagcgaaacattccccggaatgcgtcgcacaatacgcggcggcccgtctgcacacaccatgcgcgcagacgggccgccggagaaacgttcgaatcactccaccgcgatggcgtcgatctccacgagcgcgcccttgggaatcatgttgttgccaaaggccacgcgggcgggcttgacggagccgatgaacgcctcagcgtaacgtgcgtccacttccttgaagtcctcgacgttcttcaggtagatggtggcgcggcacacatgctcaatgccggtaccggcagtgtcgagaatgtgcttaatattcttcagcgcctgtgcagcctgctctccagcggtctcgcccgccagttcgccggtggccggatcaatgcccagctggccggatacgaacacgaagccattggccttcaccgcctggctgtatgcgcccagcgcggccggcgcctcggaagtggctacggcttccatcttttcgctcatattgtgctccttctcatcttgggggcgcccacctgctgcggccggcgccggtacacatcaccaccggctacgaccaatcgcacgatcggcaacgattggcaatgccgattacgtagcagtctactgagcgaagtcgcgtttagcgcgcatgatgcccggcatacggccatcaacagactattccttgctattccagacgattccagacgattcgactaccgttctcgccaaaccgggcggtttttccacgacccaagcgagccggcatcaccgaccccgacaccagcaccagcaccagcaccagcaccagctttgcacgcgcttaatatcacgcgccgaatatgcaaaaggcttccggcggctagccgaaagccatgctggtgggcttgatggggatcgaacccacgaccttctgttccggagacagacgctctatccactgagctacaaacccgagcaacttctttactgtacaccacatcacgctgcatgaggcacatacgtcgccaaaataacgagaaaatcgccatcatcggctctacaatggggttatgtcggaacctacagatgacttcgaatacgaacgccgcttcttctgccgcgagctgccggcggaatacgacgacggcgacgccccgaccctcatcattcagagctactacgtgcatgccgacaattacgccttgcgcgtgcggctggtctcgcacaaggtgcacgtcgacatgacgcccgacgtaaatccggtggccgtgctggacgaataccgcgaccggttctcggaagcgtatgtcaccgtcaaaggtccgtccgtgggtggcacgcgctacgaggtcgagcgcgagatcgacacgcgcatcgccgccgaactcatcaagcgcggcggctcggtaatcatcaagaaccggtattccgtgtggattgcggaagacggctggagcgtggacgtgttcggcgggccgaacgcgccgctgatcgtagccgaggccgaacgatccgggccggttaccaatctgacgattccgaaattctgcatcaccgaaatcaccgatcaggcgcgattcaataacgatggtctcgccaaccgtccgttctgcaagtgggcggatgatttcgaggaggagctggcgctggaggggccaaggttccagcagtatttcgggaagaatcggatggtttaggggaagcagccaagtacgctcgcgcgctcctctcagtcatctacgcctgacagctcctctcaaagaggggagccaaaaccacttagtacatgagggtggctaggcgacggcgggcgcgagccagacgcgggtcggtgggttcggggatggcgaagtattcgagcagacgcttgcgaaccggctcgatatcggccttgtgcccggcggccaaaaagtccagcaaacggtcgaaagcgtcttgaatctggccaccgatcatgtcgatatcagccacagccaactgcgcttccacatcgtccggcgctgcggcggcagcggcacgcacgtcacgtacatcagcggacccggagcgggccagcaacagcgccttcgcacgttcgcgggcggccagtgcatcggacgggtcggattcgagcacgcgctcgtattcggcggcggcaccggcgtaatcgccctcctcggccaaacgatgggcttcggcatgctccggcggcacctgctcagcacccacgccggcaccggtggcaccagcgctcttggcggcatcggaatcaggatcacccgagtacggcgcggtaccgttcacaccagactgtgcggcggcctgaatgatcttcggaatcacctcgtcggtaagttgcttgagctcgtcgtcacccggaaggccctgcaacagtggcatcggacggccggcaatcaacgcgaacagtgcgggcgcgccctgcacctgcaacgcttgggcaatcgaaggattggacgagatatcgatacgggagagctgaatctggccgttcagggcgttcaccgcgtcgcccaacgcacgggccatcgggaacaggcggtcatcggtcggtatccacaggagcagcaggatcgggaaggtcgcagaagtctgcaccattgcctggaaggtgttttcggtggtgtcgatcacgtacccaccagcggcaggagcgccacccgcctggccgggctcggccttgacctgatgcttcagcgcctccaaatcgacggcgcccgccaatgagactcccggattgaactgctgctctgccataatgcctcccgattccacgcgattcgcgtacaacaacaatcacatttgctgacattgattgtaatgccgattcccaccacgtagggattcttccactacgcggtgaaattcccaccacgtagcaaaacgcccaccacgatgtgactcaaaacggcaccattgtgcgaaaggtaaaacttaccgacatcgtggtggatgaatcatatcgtggtggggcgttaaccgcgcggtgggcggcggcaacaactacagcgcttcgacctttaccggctgacggtcggcacccacggcggtgatttgctcaccggagcttgccaacggaatgtacaaggccaccacgttcacatacgtgaccttcatggtgctggtgtacttgtcgctattgaacagcgccttctcgtcgtcggaagccggctgcgattcgcggccatcccccgccttgcgagtccattcgccgttaatacggccaaccaccaaatcaccggcaccgtctgcagcacgcatcacccacatctgttcaggcacaacggtgaatttctgctcctgcgtaccgttgttgcgttgcataccttcctgcaccttggccgtggtattggccagttcctggcgcagcaaatcgtctgcgaacttggaagcgtattggctcttggagccgttctgcagcacatcggcgtattgggtcaaggcatcggcgggagtggccaccagcttctcatcctttgcagtgcccatctgcgagccaatagtcggaatctcgaacttcggcagcttggccccctcaaacagtcgagccatggccatcagcttgtaattctgctgggcggattcctgatcgaagaccagcaaacgcttggactgctgatcttcggtggtggtcgtgatggtgaacaccgagcgaggccatccgtcgtccatgggaatcaccgtctgggcgatgtccttgggaatggtcgcgtatttggacataccgccgccgcgctggttgatcgtggtctggctgatgcgaatgtccagctggggcccgcccataacggccgcatatccatcgggattcttggcctgatcggcttcatcgatcgtcttgagaatcttcaggcgaatcttcttctcctgtgcctcggtcaaatccggcgcaaccttggtggaggtatcagcagccggcgtcggcagccggccttcacaggcggtcaacggcacgaccaacgccacgcaggcgagggcggccacacacagtttgttccatcgcttgttcatcagctttcctcctgtccgtcatcggccgagtcgtctccggtattgacctcttgggccaagcgggagaagtaggcctgcagttcgtcaggggtgattaccgaagtcgattcgttatcgccggcgctgaagccggtctcagcgccgctctcggcaccagtctgctggtcggcgaccaggttacgtgaacttgggtcgatgataaccggtgtttcggtggcttcagattgcgaggacgcacggcccgaacgccgatttgtggcgtggcggcgacgattacgtcgacttgcaccatccggcttcccggacactgcgatgctggcgggtgcctcttcctcaattacggcgcttgccgtgccttccaccatgcgcttgcggcgcttatgcggcggcatggcgaacacggaggcgcacaatacggccagcacggccagcaatccaccggacagatagaacggcatcgcaaagtccggcacttcggagcgcacccagtgcagctgcaccttggcgttggtggcattttcacccaaatccacaatggccaccgtcgaggcgccggtcttcttgctctccagcgaaacggacccggtgccgcatttcacggcagtccacatatcggaatccttgaacgccaccgcgtcatcggcactggcaggcgctccctgactcgtgctgcttcccttctgggtgctcagctcgctccatgacgccaatccggtgatacgggtataggacttctcggacgcgacccatccggcaacatccttggacggacccaacgccacgcacgcctcgtcctgagaggatcccgagtccacggttatcgtggcgttctgatccaacaaggtcagcacattcggatcagtgacggcataccgggagccgctcatggttgcggaagcggtgatttcagtggagggcttccatatcgtggcattcatgtaccccaacaccacagccgccacggccaatagaccgaagataggcgtcaccactccacgcatgatcttggcatgacgggatggacgcttggcgcccttatccggtcttgtagtctgttcttcagcactcataacttaaccattctacaatcttcacctgtttattacctaggagcgcagaaaatcaaggttcaccagtagggtggtgtgtcatgcgtaagtctgttaaatctatgttatcccctctcggcaaggccgttgctcttgcctgctcgctggcgatgtgcgtatcgctggctgcctgctccagttcgagctcggactcgaaatcctcttccggctcttctgacaagaaggggcaaattgccggcgtgaccgccaagggcaagctcggcgagaagccgaccatctcctttaatacgccgatgaccgtgtccgacggctcctatgtggtgctgcaaaagggcgatggcgacgtgatcgaggagggcgaccgcgtctgcgcccaaggcatcgcgctcaacgttaaagacggcaccgagctcatggacacctggaccaagaacacgccggattgctcgctgaaggtggattccaagaccctctcctcgacctactacaaccagatcaagggtgccaagatcaacaccacgatcggctttggcgtcaacgctcaggattcgtccggatactcttacattttggcgatgacgtttgtatccaagtccaaggacctgaagaaggccactggcgaggaagtcaaggatgtgccggccaatctgccgaaggtgacgcgagccaagaatggcaagccgtccattgacataaacggtcagggttcggttgattcgctgatctcgcagacgctgatcaagggtaacggcgccaagctgaccgacaagaacaccgtggtggtcaagtacaccggttggcttacggatggcaagcagttcgattcgtcctgggatcgcgattccacaatcgacgccgatctgttcagcgattccagcggccagcatcaggttatcgagggctggcagaagggtctggtcggccagaccgtcggctctcaggttctgctggtgattccgccggatcaggcctatggagataaggagcaaggttcgattcccgccaactccacgttggtcttcgtaatcgatattctcgccgcgtactaaacaatctcgatggctctccccaagaggggagctggcagcgaaactgactgaggggaggcctcacggaatataccgtgaggcctcccctcagtctctctatgtacgttcgaaaactccccttcaagagggaagccaagaacaatcagaacagcctgagactgtcgtcctcggtgcctttcatatcgtcgtaatcgaggatgaggcaggtgaagccgcggtccttggccaagacctgggcttgcggcgtgatggtttgtgcggcgaagatgccatgcaccggggccagcagcggatcgcgattgagcagttcgcagtagcgagtcagctgctcgacgccatcaatgccgccgtgacgtttgatttccacagccacatgctcgccctcggcattcacggccatgatatccaccggaccaatggcggtagggtattcgcgacgcaccagcttggctcccttgccgatacgctcgatctgctcggccagatagcgttgcagatggtcttccacgccatccttgatgagacccggatcttcgcccagatcataggtttggtcggaatagatgtgttgcagcgtcacttcaagaatgtcagagcccttgtcggcgctgacacgtagcaccttttccggctcaccagcggcgacactttccggggaatgcgtcgcggaatcaccatccacagccccaccagcgacactttcccgggaatgttgcgcggatttggcggctgggtcgatctcacgaatcgtgcagggcgcggtcatccagttcagcggcttgtaggagcccaattcggagaaaatcaacaggctggaatcagccttgatcagcaatacacgcttggccaggggcagtgaggcgttgaggcggcccgaatactcagccgaacagtcggcaacaataactcgcataggccaccactgtagcgcaacacatggcatacatagcaaaaggggctctctggaaaaccagagagccccttgaggagttggttcagatcactcggcggtgccggagtactggacgtcgtggccgcgctcgaccgccacggtgagtttgttcgagtcgaaggagatgaatccgtcggtcacctcgaacatgtggcgatcgccatcgggctcaaccacggtgagcgtaccctgcttgatcaccgtgagcacaggctcatggtcgggcaggatgcccatgccgccctcagaggcgggaatggtcacgctcgtcgcctcgccgtgccacacagggtggtcagcggcgacgatgttgaccttcatcgtggttttttccgcagccatcacgcacccagttccttctgcatgttgtgccacttctcttcgagatcatcgatgccgccgataccggagaacgcctgctccgggacgtcgtcgtacacgccgtcgcagatgcgggtgaaggcttcgatggtctcgtcggccggcacgtaggagccggggcgaccggtgaacttctcggcaacgtagaagttctggccgaggaactgctcgatcttacgagcgcggttcacggtggtcttgtcctcttcgccgagctcgtcgataccgatcaaggcgatgatgtcctgcagctccttgttacgctgcagaatcgccttgacgcggttggcgcagtcgtagtgagcctggcccacgtaacgcggatcgaggattcgcgaggtggagctcagcgggtccacagccgggtagatacccttggaggcaatgtcacgagacagctcggtggttgcatccaaatgggcgaaggtcgtggccggggccggatcggtgtaatcatcggccggcacgtagatggcctgcagcgaggtgatcgagtgaccacgggtcgaggtgatgcgctcctggagggaacccatctcatcggccaggttcggctggtaacccacggcggaaggcatacgacccagcagggtggacacctcggaaccggcctgggtgaagcggaagatgttgtcgatgaacagcagcacgtcctggttctgcacgtcacggaagtactctgccatggtcagtgcggtcagcgggacacgcagacgggtacccggctgctcatccatctggccgaagaccagtgcggtcttctcaagcacgccggcctcggccatttcgccgatcagatcgttaccctcacgggtacgctcgccgacgcccgcgaacacggacacgccaccgtggttctgagccacgcgctgaatcatttcctgaatcagcacggtcttgcccacacctgcaccaccgaacagaccgatcttgccgccctgcacgtacggggtcagcaggtcgatgaccttgatgcccgtttcgaacatctgggtcttggactccagctgatcgaaggccggcgggttgcggtggataggccaacgctcggagacggtgatggtctcatccggcttcttgttgaggatgttaccggacacgtcgaagacgtggcccttggtcacgtcgccgaccggcacggagatcggggcgccggtgtcggagacggaggcaccacggaccaggccgtcggtgggcttcagagcgacgcaacggaccgtggaatcaccgaggtgctgttcgacctcgagggtgatctcggtctccttcgcctcgccttcttccttggcgccggtgttgacgatcgttactttcagggcgttgtagatgtcgggcagatgacccaccgggaattcaacgtcgataaccgagccctggacgcgggtgacgcgaccgttggtaggctcggccgcagtggtctggttgtcagccatatgcgttcctactcttccttcttggtcagcgcgtcagcgctgccgatgatttcggtaagttcctgggtgatcgaggcctggcgggaagcgttgagcttgcgcgtaaggtcgtcgatcaggtttcgtgcgttgtcggttgccgtgtgcatggcgttctggcggcttgcggtttccgacgcggccgcggtcagcaggcactcgtggatgcgggactgaatgtacttcggcagaatcgcgtccagtaccttttcgaggctgggctcgaaagtgtacagcggagcgacatccgcagtagccggtgcctcttcatcaggatcgggcaccttggtctcgtttttcacgatttcgaccggcagcatgcgcagcacgcgcaccttttgcaccaccatgttgatgaactcggtgtagacgatgtagagttcggaaactcaacctttctcagccggcttcatgtaggcgtccatcaaagtgttggagatcgtttcagcaatttccacgccgggctggtcggtgtcgccttcccacgtcgccgcgatgtcacgattacggtacttgtagtacgtcgaaccgcgacgcccgtacacgaacagctccggctgcttgcctgccgcatcgaggcgggacagcagcgactccgtttcacggataatcgaagaggtgtacgggccggccataccacgatccgaggtgagggcgagaacagccacgcgcgggttcttctcgtccttcaccgcgatcggatgcgtgatatgggtgtgggccaccaacgcttgcacggcatcgaaaatcgcatcggtgtacggcttcgcgttcagggccacatcacgggccttggcgatatgcgaagacgcgatcatctcctgagcgttgaagatcttcgccaacgactcggtggagtggatgcgtgatttcaatgcgagttgcgagcccatggcttacttttctcccgccacgatcttttcctgatcaaccggcgcggccttgtcaacgtccggcttcttctcgaccagcggcttgccggcggaagagacgaacgtcgaacggaactcgtccacggccttatcgagggcagcctcggtgtcggcggtgaattcctcggtctcgcgaatggtcttgaggatatcggtgttgtggtcgatgtagtccagcagtccctgctcgaacggaaggacgtccttcaggtcgaggtcgtcgagcttgccgtgggtgccggtccatacggacacgacttcctgttccggcgagtacgggtggaactgcggctgcttcaacagctcggtcaggtgggcaccacgggtcagctgggccttggaagccgcatccagatcggaggcgaacatggcgaaggattccagcgaacggtactgtgccagggagatcttcagcgtaccggagaccttcttgagcgccttggtctgtgcggcgccaccgactcgagagacggagataccgacgtccacggcggggcgctggttggcgttgaacagatcggactgcaggaagatctggccgtcagtgatggagatcacgttggtcgggatgtaggcggacacatcgttcgccttggtctcaacgatcggcagacccgtcatcgaaccgccgcccaggtcatcggagaccttggcgcaacgttcgagcaggcgggagtgcaggtagaacacatcacccgggtaggcttcacgccccggcgggcggcgcagcagcagggaaatcgaacgataggcctctgcctgcttggacaagtcatcgaagacgatgagcacatgcttgccgttgtacatccagtgctggccgatggccgagccggtgtacggggcgatgtacttgaagccagcggaatcggctgccggggaggccacgatggtggtgtactccatggcgccggcgtcttccaggctctgcttcaccgaggcgatggtggagcccttctggccgatggccacgtagatgcagcggacctgcttcttcgggtcgccggattcccagttggccttctggttgatgatggtatcgatcgcgatggcggtcttaccggtctggcggtcgccgatgatgagctgacgctggccgcggccgatcggggtcatcgcgtcgatggccttgaggccggtggacagcggctcgtcgaccgggtggcggtgcatcacgtcgggggcctgggcttcgaggatacgacgaccctcaatgccctggatctcgccgaggccgtcgatcggcttgcccagcgggtccacgacacggccgagatagccgtcgccgacgggcacggagagcacttcgccggtgcgtcgcacttcctggccttcctcaattcctgcgaaatcgccgaggaccaccacgccgatctcacgggcgtcaaggttgaacgccaggccgagcgtgccgtcttcgaacgtcagcagctcattggccatgcaaccaggcaatcccgtcacgtgcgcaatgccgtcaccggccgtggcgacatagcccacttcctgggtgggggtgtcgctcggcttgtacgacgacacgaagtcgtcgagggccttgcgaatcgaggcgggatcgatggtcagttctgccatgatcactccttctattggttattgttcagtcaagtctttgcttgtgtgtggtgttggacggattggctcggccggtcaggccggagtcgcctccgtctgcaccttgcgatgcaggttctgcagctgtgcgaccacggtgttgtccgtgacttcgtcgcccacctgaatgcgcatgccacccagtacggtcggatcgaccaccgagttgatgtgcacctggcggcccaccttggcggagtagacctcgaccagtcgctcaatctgctccttcttcagcggggtggcggtggtcacggtgaccatcgactcgcccatgtggcgggagaacttgttgatcagccactggatggtctccaagtagcggcggcggcgcaggttgcaggtggcgtgttcggcgagcctcatggtgaccttgttcagggtcttgccggagaacacctcgcggaacagcttcacacgggcctcgctggtggcctggcagtcgtacagcttggagcggacgaccggcaggttcagcagtgcggaatgcagctcggacagctcgatggatacctgcagcgtggcgtcggtggcgtcagcgtagtacatcatggcgtccacgccgaagtcctccaccgcgttggcgatgtcgcgcgcacggctccaacggcgggagaccaagtcggtcatgatctccatggtcataggatgtgcgttgtcaccgagcagtcccttcaggacggccaccttgtcggcgaccgggcgggacgggtcggtcagtgcgcgttccagctgaatgctgtcatcgagcaccttggtgatcgtgaacagttcgttgccgatccgccacgcgtcctcacgggtgtcgcgcagtttcggggccagcgaatcacgcgactcgcggtctgcaatacgtgatgcctctcctcgcatggtcacctccctttctggttacggatggtcacggtcacttcttggcgcccaggtcgtcgatcatcgaatcgatcatcgaggactgcacgtcgctgtcttccagcttggcaccgaggatcttgccggccaaggcggtggcaagtgcgccgacctcgcccttgagcgagacgatggcctgctggtgctgagattcgatcgagcgctgtgcggatgcggtgatctgggccgcatcggactcggcgcgggaacgagcgtcggcgatgatgtgggacgcttccgcacgggcgtcgtcgcgaatcttggcggcgtccacacgggcggtgctcagctgggcctcatacttggccttggcctcgtcggcgtccttcttagcctgctccgccttggcgatgttgccctgaatcttggcggcgcgctcgtcgaagatcgcattgaacttcggcatgaagaacttgtagaagaacaccgcaacgatgacaagaatgatcagggaccacacaatgtcataggtctcgggaatgaacagatcaattccgccttctgcgagcgtcattatgaagtcctcctttcactggtggattcgttttgccttctgtattcgactgagaaaacgttcgatcagtggaacatcagggcggtaacgaagccgatcagtgccagcacctcgatcagagccaggccgatgaacatgatggtctgaatcttgccggacatctcaggctgacgagcggtggattccatggccttgccgaagaggatgcccagaccgatgccagggccaaccgcaccgagaccgtaaccgatgacggacaggttgccggcgaccgctgcgagggtgatgatatccattgtgtttcctttctaacgtacttggcgacgttataaatcttatttcgttcggtcctgcctacctaggcgaggccgggttccgaaagagggggttgaacctcactcctccgggaagcttaggttgatgtacacggtggaaagaatggcgaagacgtaagcctgcaggaaggcgacgaacgcctcgaagcacgtcatggcaagaccgctgacgaaccacatcgcgccgactgggatgccttgcagcttgttggctgcatcgacgatccagtactgtgcgaatgccaggcaggtggcgaccatcaggtggccggaaatcatgttggcgaacagacggatggtcagggaggccggacggatgaccagcaactcaaggatgttaatcggggtcaacaggatgtagaccggccacggcacaccgggggtgaacagctcgtgacgcagataatggccaagaccttgcgaacgtgcggcggcgatccaatactggaccatggtccagatggcgaacaccagcggcatgaccacagtggcggtggccgccatgttcatacccgggatgatgccacacaggttgaagatgaaaatcgtgaagaagatggtggtgatcatcggcacgtagcgcttgccgcgaacctcgcccatcacgtcatagacgaccttgtcacgcacgaagtcaagaccgtattccaccacgccctgccaacggccggggatgagcttggcgcgctttgcggtcacgccgagcaccaccaacagcacgatggttgccacgatacgaatcaaaataatgcggttgatagcaaacggagttccctggaacagaatctccgggggaaggaagtcaccaaccgagggcagatgagcgcctgcctcgtcagccaacagcaatcctgcgccgagcgaaccgaccatatcacgcctcctgcttcttcaatatcaggtgtcagtttaaacccaccgggcaggcaaatgtgacgtgctcgttactttcgtctcctcggtgtggagtctgccgggcgcggacacggagtctgcgctgggcattcggctccgaatgactgaagagtgattatttgcctgcgtctagacaatgtcaatactacaccggcgcgtcttctggaatcggcggcggcgcaaggtttttcggatgttgcgcaagcgttgtgcgctattagtcataatacgaggatgtgcggcatttgcgctaccctctgatcactccgtatccgtcgtgggcgaacggcttgaaatcatcctggcgcggcccgcccggctcatgccgaatcgaacgatcagtaccgagcttcttctcagccctgagctgcggcacctcggtcaggtcgtacggcgtggtctggtacacccagttgagccagttgcgccacagcagattggcgtgggcacgccagacgaacaacggttccagcttcggatcgtcatgcgggaagtagttcttcgggaagggcacgttggtcatgcccttggccatatcgcgctcgtattcctcggcgagcgtgtacttgccgtactcccaatggccgagcgcgaacacttcggagaagtcacgtgtggcgattaggcccgggccggactgcggcccccaagtcaagatctgaaggtcatggttggcacgtacctcgttttcgttcacgccggcgaggcgggagtgcggctgcagatcaatctcgtcgaagccattggtcaggaagcagtattcgtcctgcaggtactgcgggaatacgccgaaaatcttctcggggtaatccaccttgtggatgccgtagcggtagtacagtgcgcccatcgcaccccagcacaggtacatggtggagaacacatgggtggaggcccagtcgagaatcgtcttgaactcgtcccagtagtccacatcttcgaacggcatatgttctacaggcgcgccggtgaccacaaaaccgtcgtaatagttgtctttgaacgcatcgaggttttcgtagaacttgacgagatgatcggcggaaacgtgcgtggcctcatgcgtggaggtcttcatgaagtcgatttcgacctgcagcggcgacttggaaatcagacgcagcagctgcgtttcagtctcgattttcttaggcatcaagttcaggaccaccagtttgagcgggcggacgcgctgacgctccgcctcgggcttctccagagcgaagatgcgctccgaatcgaggatatctctggccggcaggccactggggatcttgataggcatgttcctattatgtcaatattcgggataacggttcagggcattcctataacggccatttatggcgcgttatcaccccgactccggctccgccccaaacccctcgctgcgtgagccgattcacgttttaaaaccgtgggaaaatgacacgacacgccgatgttgactttctggaatctgcacctattgtagatagagctgtctgagagacaagccgacgcggggtggagcagctcggtagctcgctgggctcataacccagaggtccatggttcaaatccatgccccgctaccaacgcctcaggtttcacattgaagaaacctgaggctttttctatatccacgaggttccacaaagtcttgcctttgaacttcgccgacaggctcggctcagtgatgcctatagcccccgcaaggtctttttggttacgcccacgaagggcaagagctacacgcatattgcgagttacaaccgactgcaaatcatctgccccaacggttgccttagggctcattaacgttgttgtcatagcaattagattagcacagaactaagtcaataagctcagaaactcagaaagatttgcatacactgagtttctatggtagaaatctgagccatgaagcaatctactaagtctgagcctaatctagtgagcaatcgaatacgcggcgcactagcagctcgcggatatatgcagaaagacggtgccggcatactcggcatttctgaagcatcgttttctaacaaactggccggcagaattcgcttctccgctgaagaaatatcctcactgtccagctggctgaacgtctccagcgacgctctattaggccgtcaacccttggaggtggcgtgatgcctgatacacggttcaaagttccggtgctggcttggccgaatctgctggagggcaacactcgggccattgcgtatttgtcagcgttcgagttcggccggttcatgattgattccaaaccggagaccttcgacgaggtcaaggaatgcttcagaatctacatgaaccgaatggacgccgtcatggaggctcgtccatgacatcatcatttattgatttccgggctttgctccttctgactgtggatggctccgaacgagtccgtccaggaaatgcgtacatgcagcacgtagtgggctttcccgtccatatcccagctgccgtccatgtaccggatttcacggcctttttcatcaagggcgggcttctcgccttcccgtatgagctggctcatgtcaggaagcgtcagggggattatcttgtcctcccactgttcggtgtcccaattcaaatcccgcacgcggtgaatgagcctgcctttgtcgtcccagacggtcactgtgacttgtttggccacactctcaccgacgtttcggatcgtcaacagtcttttttcggtgtcccattggcatatccattcgacaatgtccggctgccgctgagcttctatagtgtctcgcgtgagcctgttggcctctcgcgcctcttcaaggctttggccggctattttgttggcttggtctgctttctcattggcttctttggcttccccgctggcttctctggcttccttattggctttgcgagaataccaggcacctacaagtatgccgagaaagccgactgcgacgccaccccagtcgatgccacccataattcttccttcctccgttgtttgcgacggttggttttttgtgcgattcccagcttacgcagccggaggaaggaacctaaacgtaaaccctctgcttgcaaagcagatgtaccgatggaggtgaggcaatgagtcaggagttgcagattgttgtggccaattccagcgacagcaggggctgtgtagctgatttcccggattatttcggtctgggtgccggcctgagcatgcgggtttcccgtaccgaccttctgcgttggcgggaagtgatcgatgaggctttggaaagggctgacaatgtcggtgtttgacccggaatcgagtagcaaccgtttcaatgcggagttcaggctgaccggtgatgcggggagcccgtacgagttcggcatcagtttcagtgtggatggtgattatttcgcggttggtggcctgtcgatgggtgacatggtgcgtatcaaccgtgagttcgccagggtgattagggaggcgaagcatgcacgggctttataagggtgttctcgtgttctgtgcggtgttcgtgggtttgattctggccgtcgtgggcttgtgggcttgcgttggcgtgatctgtctgtgtgcgggcatggtgttggcggatgtgccggagcgtatcggcgggaggtttggccatgagtaggggtgcgccgaagtcgatgggttaccggtttcagtcggtgcgtacccgtgacggcgtgatgctggtggtcacgccgtacacggagcgcggcgactgcatggcgaagctgtatgcgttcacccgggaggaggcgcgggcgctgatctcgtgcctagacatcctgccggacgggcctgagtagttctaggtatctttagacgcctctaggcgttcgtatgcgtgcccgacgctattcgggccatcgagaatgtaatgccgttgatgccccgtatggctagggctaggcatacctaggcgcgctgtggtggcgcgaagtcagccgcattgcaactgcggtattagcgagactaagaggttgccaccgaccctatccagccgctggtaaaggcggaatcgggcagcaataccacgcgattgtgtgtggggctggatttggggaccattcccggcaggcttcggcctgctcttgcaatcgacggccgaccgaccgaaagcgagacccatttgaggattctcggccgagatttcgcgttgcgcgtctcggccgagaatcttcgggtcttgacctctccagcactccctcccaaaagggacatgagaaaccaacgtaaggggattacggattatgagcagagcaacgttcgagatgaatctgaaggacgcgggtatccggttgcttccgaagctcaacgagttcatccagtcgaggaagaccacggaatcgtttctggtgaccatcgagcagatcgcgcgttgggccggattgaccaggcgtaacgggcgcatcgacgacaaccaggcgttccatatgatgcagttggcgcaatgccccgtctcgaagacccgcaagtacgggatgcgctgctgggatgcgcgcgaggctttgcaggctttggcgaagtggaccggctcgtgggcctgggtgatggactgatggcacgcacgaaaccgagccttgccgaggcgttgagcccgtggagcgctccgcatgacgcggccgacctgttggagggcttccggctctccatcgttgcgttggccaaggaacagcacaccgggttgccggattcgatgcgcgtactgaacgccctgcgtctgcgcaagggcaccgaactggccgcgttgggaggcgactggccggcaatgggagtgcggcgcgtcggcggcgcgtggacgctggacgcacgccagttcgacctgtgggcgcaggggcagataagcgtattcgggcgcagggccgaggcggctcagccgaccgtgcagatgcagtctcgcatgagtttgatctaggagggatgatggggtatttgacgacggtcgaggtggccgaactgttgaacgtgaagccggatacggtgcgcaagtggcggcaggaagtgggcaaggggccgcgttggacgcgctggccgggcacgaggctggtccggtacgagagcgccgaggtggaaaggtggcgtcatgccgggcagaagggataggcaacgtgtgccgccagtcgtctcggccgaggtcatcgagcggtggggcaacgactgctggctggggatgcccggctgcacgaagcacagcgacaccacggaccacatcgtgccgcatatcgcgggcgggcccaccgtgccggcgaaccttcgccgcgcgtgcaagcactgcaactcgcttcggggcgaccggacgcttaacgggtatggcgcgcttatccacgcggtcatcggccctccggctggcggtaagtcaacgtacgttgacatgcaccggcaaccgggggccgtggtgctggacttcgacgcactggccaaggccatgatgccgggctcggacgccgggcacgtcaccgtggaatgggtgaggcgtatggcatcgggggcatggtacggggcctaccggcacatggtgcgcgtcacggaaccggtggagctgtggctggtgaaaacactgccttccacgccgcgaagccctcggctgctggacgagtggatagccctggactatgacatcacggtctgcgaccccggcaagcaggaggtgatggacagactcagggcgcgaggcatggacgttggcaaacggttgcaggccggcgtgctccagtggtaccggcagggcatcactcagaccggcatcgatgcgaggctcaaggctcgcaggtcaaggctcgcggccctcgggctcgccaacggacccgatgccggcccgatcggctcgcaaccggcgcggccggcatggtaaccgtcgtttttttgagaagcgaagcaaaggaacaccccgcgcccaccgtttttggttccccacaaaacaataaaaaaagcccgaaaatagggacgacaccccaaaatcaggctatgaaaatgcttcaaacagggaatatacaccattactgtgattggagcaatttctcatggcaggtttcgagggcttggagaacgcgggactgatcgaaggaccgcaggaaaaggcgacacgggagttcatcaaggagtaccgggacggcaaggccgagaacgcgatggccgacttcatctattcatcgatgctgagcatcgcccgcaacatcgacgtgcagaacgcgcgcggccgcgagataagccgcaacatgaccagtcttctgtgctatatccaacagctcgagggcatgtacgacacgatggacgaagaccccgaaatcaccgaactgctgggcaaggcggcgcgatgaaccacgaccagccgccatccttgcaaccgcgtcacgcgaccgcgcgtaaccaggaacgcgccaccgacggcgctctcgtggccaggttcagcgaactgctgggtaagccactcatcccgtggcaacgccaggtcatcgatgtcatcagcgagatcgacccgtccaccggcacctactggtacgacgaactcgtgctcaccgtccaacggcaggcgggcaagactaccatcaccaaaagctacgacgtgcgcaactcgttgtgggggccggaccgcaagacctggtatctcgcccagaccggcaaggacgccaacgaccagtttcgtgatttcgtcaaatcatggcgcaaatcgagactgcggaaactcgccaaaccaccccgcctgagcaacggcagcatggccttggagttcaagaacggcagccagctgaggccgggcggcgcgaccgaggcggccggccacggcgtgcagggcgacctgatcaacgtggacgaggtatggagcctgtcaaaacaacaggcgaagaacctcaaggacggtttcatccccacgaccaccacgcgcctgaagctcaccggcgtgagaccgcagatatggtggacgagcacggagggcaacgccagcagcgagtatttcaacgaccgcctggacaggctgagggccggcgatatccccgaccgtaccgcgttctttgatttcggcataccgttcgatgccgacccggaggacctcgaaaccatatggcgatatcacccgggggccggttatctgttcgatttcgaccaattggccgggttccgccgtcagttcgacgacgacgcggagggttgggcgagggcgttcggcaacatccgcgacgccggcagcacagacagggccatcgactccctgctgtgggccggcaccatggacgagccggtcacgccggagcatgggatgcgcgtgtgcttcggcgtgggcgtgcccctggacgcgacccacacggtgatagccgcctgcatcggcgttggcgggggacggccgccgctcgtgcagatcgttgacgacctgccgggcaccggcgaatcgcccgcgagactgctggccctccaaaacgactacagggcaccggtatgcatcgacccgcgcggcccctccgccgccttggccgatgtgctcgccaatgcccatgacccgcacacgttcgagcgcgtctaccggctgtcggacatgagggcggcagatgcggtgacggccccgcaatcgttcgtaagcgcgttggagcaacataatctcacgcacgcctcggacaggctggccgacgagcaggtgtgcagggccacgaaacgcaagagcggcgacgcatggctgtggaaccgttcggccggcgacgtgagcgcgttggaggccatgacgatggcctattggggatacatgcacctgcccgaatgggaggccgacgatatccaggtcttctgacgacatgccgctggatgccgcccaatgccgctggatgccgcccaatgccgctggatgccgcatcgtcatggacagaaccggccgcgccggtgcatggttggggccatgaatctcgtggaacgcctgctcaaccggatggcaccggcctaccgcgcggccaccggaccggaaggcccgctgacgaccccgcccgcccgcaccccggccgaccgcgacgttctgcactacagcaccgtgttccgcgccgtccagattctggagaccagcatcgcggggctgccccttcgtcagttgcgcgatggcgtggagatcgtgccccaactgccgataatctcccgccccgaccccaaccgtcatcgcagcgagttcgtccgtctgaccgtgggcgacatggtggtgcggggcgaggcgttctggctgaaattgagaggcctggacggcaccgtgaaaggtctgcgcgtgctgcccgcctcgttggtgagcatcacggacctgagcggcgaccccgcgaacccgtggaagcaatacgggtacatgggcaacgtctaccgcgatgacgatatccttcacctgccgttcgtgagcattcccggcagactgcatggactgggacccgtggaggccggccgcgcggaaatcaacggtgccatggacgcgagggacgcgaaggccatgtggttcgacgagccagcccagccttccggcatcctctccacggacaagatgatcaacgacgaaatcgccaccaacaccaagcaacggttcgagaagaacatgaagggcgtcaaggtcatcggcgggggcatgacctacacgccgttgctgctcagcccgtccgacatgcagtatctggaaacccagaaattcgacaccaccctactttcccgactgttcggcatcccgcccaagctcatgctcgccgaatccggttcgagcctgacctacagcaacgtggaacaggaatggagccagttcgctgacttcaccctcaacgcctacgtgcagccgatgaaggacgcgctgagcatggtgataccacgcggccagaccatcgatttcggctgggactcgttccgccgttcggacacgaaaacccgcatggagacctacaaaatcgctatcgaggccggcgtgatgaccgtggacgaagcccgctcaagggagaacatgcccccgctcggaggctcacaggaaggaacaaacaccgatgaagcatgaaatcggattcaaggggcgaatgctcgcccgctccgaggacgacggcgacgggcgcaccatcgagggcgtggccgtgccgttcggcgacatcatcgacgtgtggggcgaacgcgagaccttcgaccccgacaccgtcttcgaggggctcgactccgcgaagctctactaccagcacgacacccttatcggctccatcacatccggcgagaaccgcgacgacggcctgcacatcaccgcgcgcatcgcggacacccagcaggggcgcgacgccgtggccctgctgggcgagggggccctggattcgctcagcgtgggcttcgtgcccatcgaggaccggaaggacaaggacggcgtgacccatcgcaggaaggtccggctcttggagaccagcctcgtgagctggccggcctatgaaaacgcgaaactcaccaaccatcgcaacaacaatcaggaggaaaccccaatgaccgaaccggacgagaaatggaccgaagccctggccaagctcaccaaccgccaggacgaacaggccgagattctgcgcggcatcgagaccacgctgaccagccgtctcaatccgcagcgcggcacgtcgccgctgggcgaataccacagccagggcgaactgctcaaggcgctggtgtccgacgacaccggcaaggccgaagcggctcgggaagcctacaatgcgctgctgtcccgtaactacaccggttccgtagtggcggacaccgacccgcaacccacctggatctccgaccgcatccgcattctggagcagaaacgcaagatcgccacgctgctcacccatcaggccctgccggcggagggaatgagcatgaactatctcgtgctcaaatccgacacgcacaccgtctccaagcagacgaaggaaggcgacccgctgcctttcggcaaggtcacgttcgacgacgaatccgccgtcatcgacacatacggcggctacggcgacctgagccgccagcgcatcgaacgcatgcccgtgggggacgtgagcttcgagatgcgttgcctgaccgcggcctacgcccgcgccaccgagaacgcggcccgaaccgcgctctacggttccatcgcagccattaacgacacggacaaactggccgtgagaaagaccgccgatgctctgaagcccaacgactggatcgatctcatcatcgacgcatcggccaagttcgacgacgtgaacgcaaccctggactacatcggcgtgagcccggacgtgttcaaggccatcgcgcacctgaccgacgagggcaaccgtttcctggacgtctccggccaaggctcggacacgctcggctcgctcgacccggcatcaatcagcggccgactgctccgccaggacgtgcgtatgctcgatggcgcgccgaacggcaccgtggtgttcatggacaagagcgccgtgaccatgtgggaatccaacggctccccgttccagctccaggccgacaacatcatcaacctgacccgccagttcagcgtctacggctacgccgcgttcggcaccacgttcaagcagggcatcctgcccgtcaagttcgccaccgcctgaccatgagcgacaccgaacaggacccgctcaccaacagactggcctatctcgccggaaccatggacgatgacgacaggcccacgctatcggacatgctgaagaccgcgcgcgcatacctcgccccgcacatcgccggctacacactggcccaaccactgctcgatgacgtggtgcttggcatctccctcgacctatggcaggcgaaggacgcgcgcaacggcatcgtcggcctgaccgtggacggcgtggaaccgttcagaatcagcaccgacccgatgcgcagcgcatggccgaaactgcgcgccgccggcatacccgccggcatgggggtgtcatgagcgactacgacaacacggtcgccgaactgaccgaaaagctcacagggctcggcggcatcgtcacacaggtgaccgacgatcccacgctggtcaaaccctcaccgggcaaagccagcatctggatagaaccacctgatttcacatgggagggatggcacccctacccgccggaaatcaccatcaagctcatggtcacggccggcacccccaccacccagcagaaggccatccccctcatcatgcaggtgctcgaactcatgcaccaggagaacctgccactgcgcagcgccaccgcctcaggcttcaacctcgccgacgcgggcacgctcgccgcatacgaagtcactttgaacgccatctaacacgaaaggaaacaaccatggcagacaaaatccgcaccctaggccccggaagcctcgtgatcggctccgacaccgacacctacaagctcgacatggactgcacgaacgtggaactcgtgcccgacaattccagcgaggaccccgacaacttcctcgacgggcacgtggaaggaggcgagctgaccacctcgtggaaactgtcgggcagcatcggcgaggactattccatgagcggggcccaggtgtattgcctgaaccatgccggcgaaacgaaacacgccaaattcatcccgaacaccaagggagcactccagctgaacatgagcgtggtcatcgcacccatcgcgttcggcggcgacgtgaagacccgcaacaagaaggatttcgagttcgccgccaccgatgtgaaggcctcggaatacaagcccgccaccgaaagcgtctgatggccgacaaagccctgtacgtggtcggccagaaacgtttcgttgccacgatgcgcaaggccggcgcggacatgaaggaactcaagcaggtcaacagccaagccgctgaactggccgccccggccgcacgaagccgcgccccgcacggaaaaagcggacgcctggccggcagcatccgagcaggggccacgcaaaaggccggcgtggtccgagccggccgcaagtcggtgccgtatgcgggcgtcatcaactacggatggcccaaaaggcacatcaaaccacgctcgttcgtcaacgacgccgtggccgccaccgaaccgcaatggaccaaactctacgagcaattcatcaaaaagacattgaaccaagtgcaaggagcatgacatgagcaaacaacccaccgcgaaagtcacctatacggacggacgcacggaagaggcgccactgaccccccgcgtcatcaccagcgtggaggaacacgcgcagaaggcgggatgggctcccggagaaggcagcaagctgcggatgtcctactacatggcgtatctcgcgcagcgatatgccggaaacacacaaatcccctacgagcagtggctcgactccgtgggcgagatcgaggtgaaaaccccggaaaaccctaccgaatagacgcctggccagacggttcactgggccgtctctcactgatcctgtccgccagattcggcggcagcccgtgggcatggagggagaaggccagcgagctcgactggggggcgggaatcgaactgcttatggaggaaatggaacgcatggaggaggtgaaccatggctaagagcgcgatcatgtcggtgcgcatcaccggcaattcggatgatgcggtcaaggccctatcgaaggtcaccggcaaggccgccgcgttcggttccttcatgggcggtgcggcgctgaaaggcgtgacggcgctctgggacacgctcaagggcttcacctccgacgtgatggccatgagcgattcgaccgacaagttcaggaacacgatgaacttcgccggcctcgattccaccgccatagacaaggcttccaaggcggcacgccaatacgccgacgaaaccgtctacgacctctccaccatccagaacaccaccgcgcagttggcggcgaacggcatcggcgactataccggtctgaccgaagcggcgggaaacctgaacgccgtggcgggaggcaatgcggacacgttcaaaagtgtggccatgatgctcacccagaccgcaggcgccggcaagctgacaacggagaactggaaccagctgacggacgcgatccccggcgcttcgggcaagctccaggaggcgatgctcaaggccggcgcatacaccggaaacttccgtgacgcgatggccgacggtcagatcaccgccgacgagttcaaccaggcgctgatgcaattgggcatgagcgacgtggccaaggaggccgccaaatccacgcagaccatggaaggcgcgatgggcaacctcgaagccgccgtgacaggtggtctcacggatgcgttcgatctcatcaagcccaccatcacgtcggcgatgggcacggcggccgaaaaggtcaccgcattctccgacagagccgtcaccgcgatcaagggcgtcatctcgttcgtccgggacgggaatttcaccagcgagttcgcgcaggcgttcaatgtcagcgaggattccccggtggtggatttcctgtttacgatgcgggacacggccgtaggcgtgttcgacgcgatcaggtcccgcgccggcgccgtcaaggccgggttcgaccaggtcgtgcagggcatcggcgcggtgctgggccccgtcgtccagttcgccacggacgcgctgggcctgaccaacaacctcgatgccggagccaacgcttcacagacgttcggcgcgatcctcgatttcgtgtccacctccctccagtcggcgggccagtggttgcaggacaacgcgcagtggctcggcgcgctcgtggtcggcatcggcgcggtgctgggcgcctatcaggcgtggcagacggcgatggccctgtggcagacggccaccaagatcgccacgggcgtgcaagcggcgttcaatctggtgatgaacgcgaacccgatcatgctcgtgatcaccgccatcggagcattggtcgccgccctctcgtacttcttcacgcagaccgagaccggtcgtcggatatggtcgaatttcaccagctggctcggcgcttgcgtcaacaacatcatcggcttcttccaagcactgcccggccgtataggcgctttcttcagcaacgcggccaaaggcgcgaccgatacatggaacaacgtggtcagctggttcgccggtttgcccggacgcatactcggcgccatcggcaacgtcggcagcctgttgtggggtgcgggcaggagcatcatcgacgggttcctcggcggtctgaagtccgcatgggacagcgtgaccggcttcgtgggcggcatagccgactggatagcggagcacaagggcccggccagctacgacaaggtgctgctcgtcaaaaacggccgcctcatcatgcagggtcttgccaagggcatgagcaccggcttcgacaccgacgtgcggaacgccgtcaaacggatcaacaccggcatgggacgactcgcctttgaaacaccgtccgcatccatggcgcaacctgtcggcaacacatacaacatcaccgtgcaaaccggcatcggcgacaaatacgaaatcgggaaaaccgtggtcaaatgcatcaaggcatacgagggggcacgagcatgagcggccgtctcgcattgctgtacctcgaccgtggcaatggttgggagtgcctgaccccgcatgagaacgatcaggcggctttggagtccctgtcgatcgattggggcgtggattccatcggagaccagcctgacgcgcccgtattgcggttcacgatccgcgaccgttccggcgatctcgccggagacgtgctgtacctggccggcgccaaggtctggcttcagaagacggacgcagtgccgtggcaaacgttcgacattgccggccagtggcggcaggttgcggaatcggtgtcgtgggccgagctggccgatctgaaaccgccggcgatcccatcgacgccggacagcgggctcgaaacgattttttacggtcgtgtcacggtgggtggcgaggtcacgcagcgcaagggccggaatgattggctggtgtcgttgtatgcgtcgggcatgagcgtgctcgcgcaccgtcaggccgcgcaggggccggagcagtccgggactttggccggtcatcactggccggcgtcgccgtcggaacgcttggatgtgttgcagtctcgactggcggcgttgaatataccgttctcggatactgcgttggcgtggcttcgccggcatcttcctcccgtcttggccccgtacggggatgattcgcaccccgatctgataaccctcgtgcgcaatctcgcgtcgtcgtcgccggactggccgctggtctacgaggcgtacgaacagggacggaacacgccgggcgtgatgacggtgggattgccgggctcgcccgcgtacgtggcgatgctgccggacggcacgctggcgacctcatggcagggacacgtgaccggcaccgtcagggccgagctggtcatggtggacgacaccacgctggcgttgcccgatccggtcacccaggtcacgctcaagggccgcaaggtcacatgggacggggaaaagtccgtgttcggattcgaggattcggaactcacgttctcggatcgaggcctcgtgccggataatctcacggaatcgcagaagagcgtgtcagtggactccgacgcggtgatccgagacgacaccggcggtcgttggacagccggcgtctacatgccgtcggattccgaccgtttgcggcgcgcggacgtgatcctggccaacagcacccgtttgcgcccgcaatcgttgcgcgtggaatcacgcaaggtggacgacgtcgaatatgccgcccagttccacccatgggccgggctaccgctcacgttcatacacaaccgctacacgccgctggtcgcgcgtgacggcacgccggccacggccggcgcgtggctgccggtaggcggcacgctcacctaccgtcatacggccggcgaagccacatggagcaacgagctcgacctgcatcccctgccgcgcgacccgaccctgcagccgttgcgatggggtgacctgcggccgttgacgtgcagatgggaacgagtgaccgacatgacgtggtccgaatggggccagatagacgtgatagcaaccaatgaaagcgaactggacaaatgaaggaaacaacgcgacaccacatcaaataccccgaaggaaccgacctggtccggaacgcctcgcagcagttccaggatatggcccagtccatcgacgacaacatcgacgacctgcccgacaccatcacccagaaggtgaacgacgcacagcaggccgccgaacaggccatgcaggacgcgaaaaagtattccgcgtcagcccaaaccctgcaggatggagcagtgtcatcactgatcgatgaccaatcatcacaatcgtatcgatcagtcattaatatgctgggcgacgtggtcgtgcagcgggacaacgtggagacgatggtgccccggcggcgcgtctacattaactgcacgttcgaccgggattatccgggcgggcagttgaggacggcggacgacctcgtgttcatcggctgctggttcgctaagcccgcgggccgcctgtggactatgaacggcagggactcgcgcagggggctggcgcgcgccacgttcgttaactgcgtgttctcgggcgcgtactcgggcaacggcagcgacttccgtaaccaccagatcgtgttcgaccagatggccggactcgagttccgcaactgcgagttcatggacatcgggatcagagtgcaggcgaacggggagaccggcaggctcatgggcacgatggacatgagcggctgccggttcaagcgctccgacttggacgtgtaccggacgatcggcgacgagaccggcccggacttcagccacaaggagttcgtgtcggtgccctcgaagtacatgtgccgcgtcgactcgtgcgtgttcgaggggcatgggtcgcgctgggactcgctcgacctgtacaactgctggagcgccgtcgtggccggatgcaggttctacgtcggcgaccatgcggtggcctgcgagtcgaagagcatctgggacgggagggacggcggcacgtacggcaatgagaccagcgtgaccggcgagcaggtgcaagtcacgttctccgactgctggttcgtcggcgagccggccgcgcgcaactgggtggccgtgagcgcgatgacgtacagccgcaacggctataccgccgcgtcgggatccggttacaccggcaagcacgtgcacctggtgcggtgcaggctgtggggccagggcgggagcatggtcgaggccgcggacgcgagcgtggccatgcgcgactgcagggtcgacaaagccgcggacgtgccgaaccggctcgtcaccctgatggggggctccctcgacatggacgcgctcgtgcgtctcgaggcgtgcgaggggacgatcgcgtggcggtcgtggcgggagtcgtcgcatacgcgcgtcgaggcgtacgacagcgtcctctacctcgttgtgatcgacgacgcgatcacgctcaacaacgtcatgttcgcacgctgccggttcaacactgacggccgggtcgcagacagaccgtacggctgctactcggacgcggccggcaccatcgttatgcgcgactgcgagtacacgaccttcaaactcgccaagggacggttggaggcctacggctgccggatggactccctgggcgcatgggacagcatgcgcctcgaacactgccacgccggcagcatcgacaccggcagagtcaccggccgggtcgaataccgcgacctggcctacgacaccggcacgctagacaaaaacaagctcacaccactcaacaccaaggctttgtaacaaaggagacatcataaatgcagcaaaacggaatagcggccctcgccatcgtgggcatattaatgaccatcgactatctgaccggcctgatgaaggccgccatacagcacaacatcagctcggaaaagatgcgtctcggcctgtggcacaaatccggcatgattctggtcatgctcctcgccgagatcgtcgaacacggccagagatacctcgacctcggatacacggtgccgctcatcgtgcccaccgccgtctacatcagcatcaccgaaatcagctccataatggagaacctcggcgagatcaaccccgacatcgccaacagccccctgttgcaattgttccgcagcggtaaggacccgaacgatggagacagcaagtcatgatcctcgccaccgcaatgctgtggatcgtcggcataacggtcgtcatgctgttcatgcatggcagcgaccatcgccgttgagcaccaccgccgactggctgctcgccatcggcgcgatcctcttcatcaccatcgtggccgtcatattcggtatggccatcgcactgttcctgctcacgctcatctgaaaggaaaacaaccatgacaatgacaatcgaccaattcatccagacctacaacggcagggccgttgacgtcgatggggcctatggcggccagtgctgggatctgtggagccggtacgcgcaggacgtggccggcgttccgcagtcggcgaccaacaccgtcaacgggtacgccggcagcgtctacaccagcacatgggaccagcagcccgcattgcgcgacaagttcgaccggctccctgccggcaccgcgccacgcaagggcgatgtggcgttctggggcaacgcccccgccaccccgtacacgcacgtggccatcgtcatcgccgaccagggcggcagcctgctgtgcctgacgcagaaccccggagccacgcatcaggccagcatcaccaaggacggcctgctcggctacctgcgacccaagaccgccgcaccggccgcgccgagcggcatcgccggcgcgtggcgcgtcaacgtggccaagctcaacgtgcgcgcgcagccgagcaccggcgcccagatcgtggcccagtattcggccggccagaccgtcaacctcgacggctggaccgtccgcgcggacggctacgactggggccgctacatcggagccgccagcggacaacaccgctacatcgcactgggcccggccggtaccaccgactatctgaagcgctgaaccacagaccccggttacacggcaagcctgacggcgtccaacgcgctgcggagcctgctgtcgggcatggccacgtaaatctgcgtggtctccaccgacgaatgaccgagcagacgcgcgaccaggaacagatcatgcgtctgctcataggtcttggtggcgtacctgtgccgcaggctatgacacccccagccggccggcagcagcttcgagatatgacggttcacatagctctgttcgacatgcccgccccagcgtccgggaagtagccagccgccgcaatgctcgatgtaatcggccagatcgtccgggagcggcacgatacgctgcttgtcgcccttgccggtgattatcagcgatttgcctaaaaggtcgtccatcacgtcgcggctgtgcaccttcgctatctcgccgcgcctcaatccgcactccgccgccagtctgaccatgacccgctcacgctcggtggccttgtgcagagcggcgatgatgtacttgtctgggcatggcctcggttttggtttcggtcgtttgattttcggcagttcgtcgctcggatcgtcgccacgccggccggtggcgtgcatccacccgtagaagctgctcagtgtgtttctgtaccccttgcggctttccggtttccatttctgcgccgccatccaatgcaccatgtcttcggccgtgacttccaaaggcgtctttgccagatcacgtgcggccttggtcatcttgcagcgccggcaccgcaccgtttcgtcactgagaccggccgccttcagcgattcaagccaatcattgatgtcttccgcccaggccgccggcggtggcgtttgtttcatacccatggcgcaccatcacaccacaagaccagtcacgcagctagaataaacgccgaaaatcgggcttcatggatttgaaccatgttcctctggcgcaccatgttgccagaggaacatggttcaaatccatgccccgctactgcgggcgaggccgtcacgattattcgtgacggcttttcgtttatccgccgtcgtgccctacggggccgcatatccgatcggggcgatgatgtcctgtgaaaaaaacaacatccaagcccgctctgggcagaatcaatcaatctatggctcgaccccctcaaggcggcgggctactcccccaacacgatcggcacgcgccgatgccagatgtccgcattgtcgagggcgcttaagggcgatctagggacgtggagggcgacgacctcgccctgctgatccaatccgccaacggctatccgttccccggccggtggagcggccacgcctcggtcgagaccacgcaacggtacatcgccatgcccgacgaccagctgcgcgccgccgtggaagccacgcgcctcgccgcctaggaggatcacgatgttccgtttccccgactcgattgtggtactaaattgattgtggtactaaattatggtaccataataagcatgatcgaatgcgagccgtcagccttcaagcactggctcacacagccacagatcgactacatattccggcatccggtggccgtgttcgaggtgcagtcgagacacgccggcgacagggtcatggcgatcctcggacacccggacgagttcagggaacgccccgtggagctgctggtatcccagcgcacccgcaaggtgttccacgcgatggactgccgccgcgaatggctctacaagttcgacgactaaaaaacaccaaggaggacatcatgagcaacgaaacagactgggacgagctctcggacgaatacaccgagcacacccccgccatcatcggcgagaccatccgcccgcaaagggcgatcacgatggatgacatcgacgacatcttcgccggccgccccctcgccgaccagccccgccggaaggccgacgtgctctacaaggcatacctcacgcccgacatggacgcacaggtgcgggcacaggccgaacgagagcacatcggcaagagcgctctgatccgcaaggcactggccgcatacctgaccgccaatcaggcacagcccgcgatggcctgacccatatacggcgaaaagcccccgaacctgccgcgtgatacggttcaggttcgggggcttcttgttattcagccttggatgccttggccttgagggcgctggcgccgatgacgacgccgatggtcagggcgacggcgctgatggtcgtcgcggccggatcggcccacgtccagccccatacggggccgagggtctgcacggacggtcacggtacgggacggtggggcgttgctgccggtggcgacgctgccgccgccgttgtaggtgacgacctgaccggggcgatatggatgaaaggcgatcaggcagctacggtgcccagggaagtcggcgatcataaacgtctcgtcgttttcatcgcggaccttcagttgtctaatccacgggaggcgacaggcgtgaagtttctcaacgaagcggaagccgggcacaagtcgtatatcacaatcgacttcgtgcccagctcccgtccttctgctcagaagcggagtgcggttcaccatccagccgacatcatcggcatcatgccgcagcgggtcaacgtatcggccagcgcatcgtccagtgcttggatcggtcatagcaacgacgccaccgaacgacgatggacagtatggcgcctatcgccagagctgacacggccagaaccgaggcaagcgacacatcgccacccgtgacgggcagtgacgggcgagggttgggcgtggttgcctccgccggcgccggtggcgtctcgggtttctccggttcgcacggtttctccgactcgcatgggggcaacacccgcacacgctcccaggcatcgtcataccggctggacgccggggaaacacggtcatccccctcgaaccgccaaacgaacacgtaccacccatgccgttcggcggtcagatgcatgggagcgccatgcgcgtccaacgccccggcgccgattttgaacgtgccattcatcgcgggaatctcccaggtggccagcaaccggtggttgtcgtcttccgtggggacctctcccccggatggcttgtacgcctcatcgttggaggggttgtcgggatcgccggaccaccatacgctcaccgtcgcatacggctgatccgccgcgaaaccataggtttcatcacccatgaactggccgtggtccgccgggaaccccgatacggtgatggtgtcgctgagttcggcgccgatatccgccgaatgttcggtaaccgtcgacatgacttcgaccttcccgcgccccacgttgctttccgaagcctccatgaacgggctcacccagtcgccggtaaggtattcctgcgcccgtttgctttgctcgctccgccggaacacccacacccaggtgccaaagccgccggtcttcggagtcagataggcggcgtcaccgtccggcttggccatggcccgcacacgaacccgctgccccacaccggtgaaggacgccttgccataagcactcggctcataacccgaggacgccagccgggcgagaaaagcgtccgcgctctcccgtgcgttcggcgcgatgaccttgcccagatcgtccttgccgagcccgtcgaaatagtatccacgcgcctgcagcttcagaccgggcacccaatgactgccctcgtcccccacgccgctggtcacatcatcgaacaccggcgaagccgcatcaagcaccttatcggacacctgcgtggacaccgacggaacgaaatccttgcgcacctggaacgtcgacgacgaaccgccggcggaagccatcgaatcgaaggccagcatgtcctgagtgctgtccatgacgtgcatccgcccatactcgtatgtggtgttcaccgtcacctcgccggcgccggtcgcctcccacgcaatcgaggatccggcgctcgtcgacacccccgagaacgtgttgccgccttggatgaaccgcgccggcccctgcaaggtgacagtgaacggcactcccgcgatcgcgtcaccgtcgcggttcaccactttcaccgagatggaaccgctgcgcaaagcctcggcatcggtgcgttccaccgtcgtgcccgcaggcgtcttgccggccgattgatcccatatccgggccgccttcgccacgatctcgggataccggccttgaatgaccgccatctgtctcgcccactcgtcccgatcgcgcccgaagtgatcctgcacgatgatgccgatcgccgcatgggtggcggcatccgtgtcgcggtaccggtcaaggatccatgccatacgccgggcgttctcatcggaggcaagcaccgtggtggggcctatcacatagtcgctcagtttccccgcttcgatgcagtagtacttgttgcccgaagcgtccagccccgcgacaccgacgtaatattccatatcgttgtatggaaacgtcacgtgatatctttcgtcggcgggcgtcaacgtcgcggcatacgccgtattcgccgagccgaacaccactcccaccattattatcagaccggtcagcatcgctacgatggccatgccccgttgccgccatgtcgttatcatcattcgtcctttcctggtacgttccccgcatactgcactgtgtgcgggtaggccacgatcatggcagattttcattcgctacagccgatttttcggcctatgtggtccgagcttgccgtttgtcggcgagttgtggataactcttccgccgagttatccacctcatgcggttgaccgaacgtttacctgcaagttatccacaatgtgcaacatatgttcaaaagcctctagaatagggccttatggcagcagtacaacatcgcgcgaccacgcgcactagtaataccgataacaacaccacgaagacgaagtcaaagacgacttctgcccgaaagagccccgcaaccaagcgcaagagagtcagcgccgaaacggcacgcgccgcagcagcgctgaaaggcctggctgtcgaagcccccgcaccgtccatcgaagcaaacgagcccggccagttcggccgcatcaatgtcatggacatcactcccaccgaggagcgtggcatcttccccgcccgtgtggaactcggcgaaccgtttgagatgaccgcccaagtgttcatcgaaggccgcaccaaggtgggtgccaccgccatcgtgcgcaacccgcgcggcaaggaaaccatgcgccaggccatgacctgcgtaaatcccggcctcgatcgttggaccgtgatggtcaagtgcggcgagcacagcgatctgaagccttgggaggatggctacgcggccgtcaagcgtcagctcggcgaatggaccgtgaccatcgaaggttgggaagacacgtacgtttcttggctgcacgacacccgtatcaaggtgcgtgtgatggacgacgtggacaacgcgctcaattccggtgccgagctgctggcccgttgggccgcaaccccggacgccggcctgaccgcacgcgatcgcaagaccttggagaaggctgctgagaccatggccgatcagacgctgagcgccgaggatcgtctcgccgccggcgacaacccgaccatcgccgccctgcacgagactcacccgctgcgcgacggtatctcccccagtcagccccagcgtttcaaggtggaacgcccgaagtccagcttcgcggcttggtaccagttcttcccgcgttccgaaggcgccaccatcgatccgaacaccggcaagatcattcagggtacgctgaagacctcgatggccggcctcgaacgcgccgctgccgagggcttcgacatcgtctacttgccgccggtcttcccgattggcgtgaccaaccgcaagggccgcaacaacacgctggtcgccgaaccggatgaccccggctcaccgttcggcatcggctccgagctgggcggccacgacaccgtggacccgctgctcggcaccatggacgatttcaaggccctgtgccagcgtgcacatgaactgggtctggaaatcgcgcttgatttcgccctgcagtgctcgcccgatcacccgtgggtcaaggctcatccgaactggttccgtcacaagccggacggctccatcgccttcgccgagaacccgccgaagaagtatcaggacatctacccgatcgacttcaacgccgacatgcccggcatcgaaaaagaagtcgaacgcatcatgaatctgtggatcgaggcgggcgtcaccatcttccgcatcgataacccgcacaccaagccggtgcgtttctggcaggacgtgattgccgccgtgaccaagaagcacccggagatcctgttcctggctgaggcattcacccgcccgggcatgatgcgtgccctgagctacgtgggcttcacccagtcccactgctacttcccgtggcgcaacaccaaggacgaactggaagagtatctgccgatcaccaatggcgacgacggctactaccagcacaacaccttctggcccaccacgccggatattctcaccgcttacgtgcgagacaacggcgtagccggccactgcgtgcgtgcggtgctggcagccatgggctcgccgtcctggggtatctacaacggttacgaactcatcgagaacaagcagcgccccggcttcgaagagcagatcgacaacgagaagtacgaggtcaaggttcgcgattggagcaaggccaagcagtacggcgtggccgagatgctcaccgcgctcaacaagattcgtcgcgcccacccggccgcgttgagctaccacaacctcaccgtgctgcctacgtccgacccgaatattctggctttcgcacgccacacgccggccgaactgaccggtaccggccaagcggacacgctgattgtggtcgtgaacctcgatggacacaacgcacaccagtcgatgattcacctggaactcggcgagctgggtctgcccaccgaccgcccgctcaacgtgcgcgacgagctgaccggccgcgaattccagtggggttgggacaactacgtgtctctggcgccttgggcggatgtggctcacatcctgtccgtgcagtgatgcggtagtgcaacggtaatgcaacagtgatgccgttgacgtgcatgggtttatcgtgtgcgtaaaccgctagaaatcctccccttgaggggaggatttcgtctgtttagacatagtgtcggcataatctcagcacggtttcttgagttccgcacctgttttgcaggcgcaaacagggtattgtggtgagacgataacgtaactgtcgattttcaaggagaaatgacatggcagaaaccttcaacgtcgttgtggaaattccgcgcggctccaagaacaagtacgaagtcgatcacgagaccggtcgcgtcttcctggaccgtaccctgttcaccgcaatgggttacccggatgactacggctacatcgacggaaccctgggcgaggacggcgatccgctggacgctctcgtgatgattccgaactccgtgttcccgggctgcgtggtcgagtgccgcgccgtgggcctgtaccacatggtcgacgaggccggcggcgacgacaaggtgctgtgcgtgcccgccgacgttcgtttcgatgacatcaaggacatcgacgacgtcaacgagtaccacaaggctgaaatcaagcacttcttcgagcagtacaaggctctggagccgggcaaggaagtcctgccgggcgactactggaccggtgctgacgccgccgagaaggaaatcatcgcggcacgcgaacgcctcgccaacgaaggcaagtgattcgattccgaatcgtcggcgggagacctctccggaggcctcccgcctttttgattcgacgtgcatcgcgtgatatagtgctggtgtatttttcagctaggcgtaggcggcgtgtaggaacgctggtcgaggcccatcgcacggtaatccggcgatgaaccttctgtcgcaccatgattccgataatcattcaaatcctgcttatttctgtttccgtagctatggatgcattcgccgtatccattggcaaaggtctggccgtatcccgcgtacgagtgcaagacgccgcgaaaagcgccctctggctcggcggattccagatgctgttccccattctcggctatttcgcggcatctacattcagcaaatacgtaacccgattcgatcattggatcatcttcgccctgttggtgttcatcggcggcaacatggttcacgaagccttcgaagaagatgaggaaaactccaaggagaccgcccagttcgattggaagcatatgcttcccctggccgtggcctgcagcatcgatgcgttcgccgtgggcgtgagcctgaccttcatgttcaccaaagcccatatggcattcgccatcctcagcatcggtgtggtcaccggactgttctccgctgcgggcctgtacattggccgcgcgttcggctcccgctggcaggagccggcgcagatcgccggcggcgtggtgctgattctacttggcgtcaaagtgctgttggagcatttgggcgttatcgcgttctgatttagtgtcataagccccttcaccagaaagggctattttgtttgatttcaccgttccaatgcccgacgtaggattgggatggaaattcgattatctgagaggcgtatcatgaccgagatcacccaggagggttggaagaacaaagccctgagcatgttgttggcccaactgacgtcctatgtactgctcatcgcagccacggtcattccctcccctggcaccgtccccatcatccccttgattatcgccgctctgacgttggccgcatttgtcgtgttctggccgttccgcggcagcatgctggatcgtatcgtcactttggtgtttggcgcgatttctctgattttcgtcatcgtacctttcccgaccggcaaggttccgccggatcagaccgctgcggatggctcggtacttccttggtattcatgggcactggccatgggcctgctgctggtggtgctggtggtcttctccttcgggcgccagatggctcgtgagaagcgcgaacatctcatccgcgccctgtcccacgccgtgacttcaggtgtggcggctctcgccgtggccggctggtgcttcctgcctgatttgggcacgatgctcgccaagggcaccgttgcgggaaccgttgccctgatcatcctcatcgttttgggactggccttggccgtggcctccacgttgtgggtgcgtgacgccgatccggacccggatatccgctatccgtggatcggtaccggcctgatgccggtaatgctgatgggcgtgaccatcgccgcaaccgcactggtgctcggccgtgtcatcggttgatggacgtctgccgttccatattccgcaaacttgtaacctatgtgtccactacaagcgcgtagaataatgaaaaaccgcgcgaaagcggcataacgccgctgacgactcgtacagccacaccaagcaattgcgtaacacattgcaggataaagggggattagcgtgacggatcttacgttgatgactttcgccagcgaccccgccaccgttttgccatcactcgccctgctttctcatcgcgtccgcgtgctgccgatggatgcagccagcttggtgaagatgccggagaacaccattctgtttctggatgcacgcgatgatctggcgaccgccaaaaccttgtgccgtctcatccacgcttccggcctgtccacgccaatcgtgctggtgctgaccgaaggcggcttcaccgtggtcaactcccagtggggcattgcggatgtggtggtcgccaccgcttccccggctgaagtcgagggccgattgcgattggtctccgagcgcggcaacgctcccgcagccgcagcagccggttctcccgccgaatccaccaccacggtggaagatggccagattcgctccggcgacctcattgtggacaccaacggctataccgcctccctgcatggacgccccatcgatctggcatacaaggagttcgaactcctcaagtacttggtccagcaccccggccgcgtgttcacgcgcgcccagttgctgcaggaagtatggggctacgactactacggtggcactcgtacggtcgacgtgcatatccgtcgtctgcgcgccaagcttggcggcgaatacgaacacctcatcggcaccgtgcgcaacgtgggctaccgattcgacccgccggagacggataaggaaactgccgccgcacagcaggccgccaaagcatcctctgccgccatcggcaccgatgacgatacccccgatctcaacaccgccgcctgacagaccagcagcgctacaaaccatcaatcatcgacattacgccgcttaggtccatacgatgagagaaaccaaatccgcgcgtctcacgcgcatgcatgacgaatacgacattctgcgccaggtgattccggcacccgcttgcgcactgcatttctcgaatccgctcgaattgctgatcgccaccgtgctcagcgcccagaccaccgacaagcgtgtcaacacggtcaccccggaactgttcgccacctaccccaccgcccgtgacttggcggccgcgaacccggcccaagtcgaagacatcattcatccgctggggttctaccgttcgaaaacccagcatctcatcggactggccacggcactggacgaacggttcggcggcgtggtgccgcgcacgatggatgaactgaccagcttgccgggggtcggccgcaaaaccgcgaacgtcgtgctcggcaacgcgttcgatatccccggattcccggtcgatacgcatgtgatgcgcgtaaccggaagactgcgttggcggtcggattggcggtccgcacaccctgatcccgtgaaaatcgagaaggaaatcaccgcctgttttccgcccgaagagtggacgaatctcagccaccgactgattctgttcggccgggccacctgccacgcacgtaccccagactgcgccaactgcccgctgtccgacacctgccctagctatgcgccgcccgccggcaagagcacgtccaagcgctaactcatacctcatcatggtgaattgcggattctaggctgaatccaccgctagactgaaaaccatgcagcacagcaagcggaacaatacatggtccaagtgggggatttttctcggagtcgccgtggcactcggcgcactcgtggttgcgggatggacgttcatgcaaaaccggttccagccgggatcatccctcgatgccgatgtgaccattggcatcgacgatatgccgcaatccttggatattcggtccgattcctctgcggcagccgagcgcctgctcgtcgacaatgtgtatgagacattagtgaccgtcgatcaagacaacaagattcagccgggactggcgacaagctggaagacttccgatgacggactgaccgtcaccctgacactgcaatcgggcgtcaccttctcgaacggtcatacgttggacgcctcggacgccgtgtggtcgttgcaacagaacgtgaccaacaaggtggcggacgtcgacgaattgggcgatctgacgtcggtcgccaatctgaacgccaccacggtggtcattatgcttgccaagcccaatccgacgctgctgcgagcgctgtccggcaaactcggcattgtctacgattctgagtcgtccagtgccgattatcaacgcaaggccataggttccggaccattcaccgtggccgatttccagcctggccattccctgaagctggcgcgcagcgatacctaccatggcaccaaagcggccagcaatatcgttgaatttatgcaatactccgacgccgatgcgctcagcaaggccctgaccgacggcagtctcgatatggcggcaccggtttcggcttcgacggccaccggtttgaacggcaaggatggcctgaccgtcaaggagggggccactacggataaggtgctgctggcctacaacaacggcatcgattcgctgctctccgacgaacaggcgcgtaaagccttccgctatcaaatcgacgcagccggcatcgcctccgcccaacccgacgcagccggagcattgggcggccccatcagcccgctggaacccggatacgaagatttgaccggactgtatccgcatgacgaaaaccaagctgggcagatgttctcctacttcggtgcgcaatatctgactacggtgaatctggtggttcccgaagaataccggtcgttggccgaaaccatcaagcagcagatcgagcggcagccgcgccccacagtgaaccttgaagtgctctccgatgaggattatgccaaacgaatcaaggacggcaaatgggaactgaccgtgatgagcatggacggcacggatgatgccggcatattcgccgaccccgattccatgttccattacgaccataccgaagcgcaacaggcctatgcggatgctcgcgccgccactaatgacgccgattatgaggcacgaatgaaggcgtacgcccggctgatcagcgaggatgcggccagtgattggctgtatacccgcaaatgcttcactgtggcgtccaccaaggtctccggctacccgacctcgatgatcaatcgtcgcatgccgctggccgggttgacggtgaagtaggcaaccttcagtcacggacgggctacgcccgatagtccttggctcactatcgttcgatcattcgtatctcgcctgcgaacagcctactgggctgtttactgtacagttcggcttgtcatgcaacgtgcataaactttggctttatgactgaaggcaaatccatcatcaacgccaacctcaccccgctgcccgacaaggtcggtgtggacggacttgaggacaagtggcgcgccgtctgggatgaagacggcacctacaaattccgcaatacccgcgaccgcaaggccgtctactccatcgacaccccgccgcccaccgtctccggttcgctgcacgtgggtcacgtgttctcttacacgcacaccgatgtgattgcgcgttacaagcgcatgcgcggctacgacgtgttctacccgatgggttgggatgacaacggcctgcctaccgagcgccgcgtgcagaactactacggcgtgcgcgtggacgtgtccctcccctacgacccggacttcaagccgccgttcgagggcactgatggcaagaagatcgacgccaaggatcaggtgccgatttcccgcaagaacttcatcgagctgtgcgagcgtctgactgctcaggatgagaagctgtttgaggccctgtggcgcaagctgggtctgtccatcgactggtcgcagacctaccacaccatcggccagcacccgcggcgcgtggctcagaaggccttcctgcgcaaccttgcccgcggcgaggcctaccagcaggacgcccccggcctgtgggacgtgaccttccagaccgcagtggctcaggccgagcttgagtcccgcgaatacccgggcttctaccacaaggtggctttccgctttgaggacggcaccccaatctacatcgagaccacccgccccgagctgctggccgcttgcacctcgctgatcgccaacccgaatgacgaacgttacaagcaatacttcggccaggaagtctactccccgctgttcaaggtcaaggtgccgattctcgcgcacccggccgccgagatggacaagggcgccggcatcgcgatgtgctgcaccttcggtgacgtgaccgatgtcgagtggtggcgcgacctgaagctgcccacccgcccgatcatccagcgcaacggccgtatcgtgatggataccccggactggatcgaggacccggccggccgcgaggtctttgccgaaaccgctggcaagaccacgttctccgcccgcaagatcatcgtcgacaagctgcgcgagtccggcgatctggacggcgagccgaccccgaccaagcgtatgacgaacttctacgagaagggcgacaagccgctcgagatcgtcacctcccgccagtggtatttgaagaacggcggtaccgacgccaagctgaacgccgagcttatcgagcgcggcaaggaactcgagttccaccccgacttcatgcgcgtgcgctacgagaactgggtgcacggcctgaacggcgactggctgatttcccgccagcgcttcttcggtgtcccgttcccgctgtggtacccggtgaacgcttccggcgagccggattacgatcacccaatcactccgtccgaggatcgtctgccgatcgacccgaccatcgatgtgccggaaggctacgacgagtcccagcgtgatgtgcccggcggcttcaccgccgaaaaggacatcatggatacctgggccacctcttcggtgaccccgcagatcgtgacccactgggctgagccggacgaggcctccaaggccctgttcgcttccaccttcccgatggaccttcgcccgcagggtcaggacatcatccgcacctggctgttctcgactgtggaccgcgcgcacttggagaacaagtgtctgccgtgggcccatgccacgctgtccggctggattctggaccccgaccacaagaagatgtcgaagtccaagggcaacgtcgtggtgccgaacgagccgatcgagaagttcggcgcggacgccgtgcgttactgggccgccgccgctcgcctgggcctcgatgccacgtacgacatcggccagatgaagattggccgtcgactggccatcaagctgctgaacgccaccaagttcgcgctggccatcggccgtgaggacgagaaccatcacgtgggcgctgccgccgagacctcgtggaacccggccgatgtgaccgaaccgctggatcgcgccgctatggccaagctggctttggtggtgcgtcaggccaccgaggcgctggaatcctacgagcattccaaggcgctggaagtcatcgaatcctacttctggcagttctgcgacgactacatcgagctggtcaagaaccgcgcctatggcactccggacgagcacggcaatgtgccgtccgagaaggctgtgaagtccgcccgcaccgctctgggtctgggcttggacgccttcgcacgtctgctggccccgtacctgccgtacgccaccgaggaagtgtggagctggatgcacgccggttccggttccgtgcatcgcgccgcctggccggtcgtggacccgtatgtcgaggccgccaccggtgcttcccccgagctgctgacttgggccggcaaggccgtggagcagctgcgtaagatcaagtccgaggccaaggtctccatgaagaccccaatcctgtctgtggcactgtccgctgcttcggaaggtgtgaacgcgattcacgccgccttgggcgatatcgcgcaggccggtcgcgtggtcggcaagttcgacttggtggccaagcacgccgaggaatccgccgccgaagacgcgcccgaaaccgaggtcgccgtcgaagccagcgagctcggtgagccgccagccaagaagccaaagcactgagcgttgcgcacaacaaca

SEQ ID NO: 3094 - DNA, 3194 bp, Unknown
  R215_18m  MAG No. k141_1307
caggatcggccagaaacatccacaaattgggcgagtacgaacaacactccccaaataatggcgaacacagccagcttggaagtcttcttcaccccttgtgcattcggagcaagcacggcaggcgcagcggcaccagcaaaatcagtggcagcaccggcaccatgtgtggcaggcgcaggagccacaccaatacgcttgtccaaagaggcgaggaactcatcaacacgcttggcgctttcgttcccagtcgcctccagacgaatggcggtcccagccgcaccctgtggaactacggttagcatgcagttcaccccgtcataggagtggaaggagagcgctccggtctgggagttttcgttatccaaggtaaacgtggcaccagtggtcaactgatcgtgaataacctggaacagctgttgcggactgaccgcatatacacgatcaaatggcgcgccggcgggccgctgcggagccgcagcaggagtcatcggagtagtggtggccccatcagacgctacgtctggctggtcagccggtacagtattcggcacggtaggcgcattgttcgtgcgatcttccggtccgtcattcgtgccttcggaaggtggaacaggctgaggctgttgatcaattggcgttgtcatgatgtcattattcccttaagtagcagcattaccagcacagaagaggcaagcccggcaaccgttacggtcaatccgactgccatggcaagccggtatcgttcgttcatcattgcgtcccttcttattgctcgctttgctctgcgatacatcgaaaccagtgtatggcgttgttattatgtacgcaaattagcattttgtatgcctgttagctttattgtcgatgcttgataccgcgcatgaacatcctttccgccaccgcacctacacggatggcatcgaccattgtcggcgacacgcgcgagccatacatcagctgacaactgaatttttcggcgtgtttccgaaaagtcggcgtcctgtacgctgggaatcgagcaaccgcgtacgatggcgcagcacagcacccgcaacacagcgacaaggagcatgggcaatggcagacatccccgaagaacatttgaccgaggaactgttggatcggctgctcgccagcgccagcattgagcagtatctcgatgagggactcgtcagcgcacgcacgctgaccgactatctgttcgaccgtatggaagcccatgacctgagacgagccgacgtggtgcgggcatccggcctcaacgccacagtggtttatgacattttctccggcaaaagccgccccggccgagatcacgccattatgctggcttttggtctcaagtgcacattacgtgaaacccaacggctacttcgtcttgcaggcgtttccgaactgtggtgcaaacagcgacgcgacgcgattatcatctggtgtatacgcaatggattcgaccgcattgccacggacgacgagttgtatcgtatgggagaggcgacgttgctaccggccgattgacgacattcggcccaacaacactcaccagtgagacgcaagtaagagggcatcaaggagagacatggacgataagcaggcgatgcatgcgatgagcatcgacgatgcgtaccatgtcgagcgtacgctcgctcgcggaccttccggcgtcaccgaactggtgagcattgacggcaacggcccgttcgtacgcaagaagattccctctcccctagcgcaacgcaatgtgtgggcggcgctcagcgcctgccagagtaatcgtctgccgcgtgtggaagcgacgtacgagctgcccgaccggttcgtcatcgtctacgattacgtgccgggcagcacgcttgcgcaaattgcggaggaaaacgggcggcttgcaccgaatgtggccgtgcagcttatcgaccaaatttgcgaagccgtgcaggagcttcaccagcacggcgttatccaccgcgacatcacgccggccaacgtcatcgcggcccaggatggcgcgcatctcatcgatttcggcatcgcgcgcatccggtcagaggcaagcaaccgttcacgggataccacggcgcttggcacctacggattcgcctcgcctgagcaatatggctttgccaaaaccgacgcgcgttccgacgtattctcgctgggccggctactcggattcatgctgaccggcgtatatcccgatgccagcgactacgagcagcgacttgccgatgatgccgcagtaccggctcgactacgcgccgtcatcggctatgcgtgcgcattcgagcccagcaaacggccacagagcgtccaagagtttcgccaggcgctgttctcccagtccaatccgcccataccgaacgcatcatcggcaaatccgccatcaacgagaacaacgaacggcagcgcgtcggcgtctcgactattccggcgtctgcacttgagcaaacgcgccatcgtgctgtggtccattgccggagcggcactgataatcgccgccattgcgggaggcattgtgttggcaggccaacttggcattatcgggtcggcaacatcacccgattcctcgacacaatccagcagccaatcaaccgataaggccgatggcgggcactcctcgaacgggtcaggaaccgacaatgccaatggcacgggcggagtaggcggcactgacggcgctgatggagacaatcgagacaccgtcaccgacaatcctctgaaaatagtggaatccggctggtcggcggaccagcaagggtatgtccactacgctttcgccctgcgcaacaccagtaagacccagcaggtgcagtatccgcagattaccattacggggcgggccaaagacggttccatcgtgttctcgcagacgcaagcactgaatatggcattcccgaatcagactgtatatgacgccggtcaagcaggcgaaggcaccgccccagaaacggttgattttactgtgctcaatccggatacatacaacgtcgccaaggctcagggaaccgccgccttccccatcagtggaatatccaaaatagacaacagggacggcggcacgacgttcaatggcgaggtccgcgccgtggcagatggattcaagccatctgatggacagcaaatcaagatttccctagtactgcgtaacgcacagaacgcaatcatctatggagatatcgcattcgtggattggccgg

SEQ ID NO: 3095 - DNA, 49941 bp, Unknown
  R215_18m  MAG No. k141_1628
acgactttgataacctgaccgatcgacatgactacctcccgacatcggaaaacgattcgagcgcctcgctgtgcgcttgctgattccattctaagggcatggcccgttcgccaagcgcgggtacaacaaaccgttgttcgcacttgcatcccggaggaagaaacggctcggtcgaacctatttcctctccgcacccttcaatgctcccggttcctctgactcctttgcgagcgccgcggatgggatgagcacgcttacgtatggggttgcgccagacaggacgtcgtcgtagaagcgctgtttggcgtcgatgaagtcgatggaatcctggatttccgcgagctgctcgaccagccgcgcccgcttgccggcgagcatctacttgcgttcggggatgctcggctcgtggaggagcgtaaggggcgcgagtaggggttcgcggctttgctgcggtctctccctcacccggctatactgggagctccctcgtcagagggagcttaaattcggtctggttataggcccatgggcttcttgggctttttgtcgctcatgagcatgaggaagctgcgggactgggcggtgatcatgaagcccgcctcatagctcagttccggcccatccgggttgtgcgtatccacgaccagctgccatttgcggccgtatcgctcatccggcagggtgaacataatcggctcgtaatgcgcgttgaagatcaggatgaagtcattgtcgaccatccggttgccgtaccagtctacctccggaatatccgaaccgtccagatagatcatcatggagaacgcatgcgtgttctgccagtcgtccatatccatgatcgaaccggtgtggtcgaaccattcgacctgcggaatcatgttcgaatcgtcgccgggctcacggccggtgaagaagcgacggcggtgcaacaccggatgatccaaacgcagatgaatgagtttggaaacgaaggcgagcagttccttgcgtcccttgtcaagatgccagttggtccaggagatctcgttgtcctgacagtaggcgttgttgttgccctgctgggtgcgggccacttcgtcgccaccgcaaatcatcgggataccctggctgaacagcaacgtggcgaacatgttgcgcatctgacgctgacgcaagtcgttgacgtccggaatattggtcgggccttcaacgccgcaattccaagagcgattgttgctctcgccgtcgcgattgccctcgccattggcttcgttgtgcttttcgttgtagctgaccaggtcgttcattgtgaaaccgtcatgcgcggtgatgaagttcacggacgccaccggtcgacggccgttgacctgatacagatcggaactgcccatcaggcgcgaggcgaattcgggcagcgtggagggctgcgagcgccagaagtcgcgcacggtgtcgcggtagcggccattccattcggaccagctggacgggaagccgcccacctgatagccgccggagcccagatcccacggttcggcaatcagcttcacgcgcgagatgatcgggtcctgctccacgatgtcgaagaacgcggacagcttgtcgacctcctggaactggcgtgccagcgtggcggccagatcgaagcggaagccgtcgacgtgcatttcggtaacccagtagcgcagcgaatcggtaatcaactgcagcgcgtgcggcgagcgcataagcagcgagttgccggtaccggtggtgtcgaagtagtgctgctggtcgccttccaccagtcggtagtaggaggcgttgtcgatgcccttgaagctcagggtggggcccatatggttgccttcggcggtgtggttgtacaccacgtcgaggatgacctccatgccggcgtgatggtaggccttgaccatggacttgaattcgttgacctgctcgccgcgctctccggaggaggagtaggcgttgtgcggcgcgaagaagccgatggtgttgtagccccagtagttcgacaggcccttctcctgcaggaaggagtcgttgacgaactggtggatcggcatgagttcgatggcggtgacgccgagcttcttcaggtattcgatgacgctcggataggccaggccggcgtaggtgccgcggatgtccggcggcacgtccatgttgaggttggtcatgccgcgcacatgcgcctcgtagatcaccgaatcgtggtacgagatgtaagggtgctggtcgttgccccagtcgaaatacggattgatgacggccgacttcatggtgtgggcggccgagtcaaggtcgttcatcgccgaggtgtcgtccgggcttttgaaccagtaggagaacaggctttcgtcgccgtcgatgttgccttcgatggccttggcatacgggtcgagcagcagtttgttggggttgcatctgaggccgtgcatcgggtcatagggaccgtagacgcggtagccgtagcgttggccgggctggaggccggggatgtagttatgccatacgtatgagttctgttcggtcatttcgatgcgcgtttccgcatcgtgctcgtcgaacaggcatagctcgactttctgcgcaacctgtgagtacagcgcgaagttcacaccggcgccgtcatagctggcgcccagcggatacattgatccaggtctgatctgcatagttttcagtatcccactttcttgtgtcactgatgtgccggggagttgaacgtcaggagaacagcgacggcttgtctttgtcggagttcctggcgatgagtctgcgtaacgcctcatgctggatggcgatcatcgaattggatgaggtgatgcgcgtggcggcaaggtcgctccacggaatccacgcggattccacgtgctcgtccgcgtcgaaatggcgctgctcccgtctgaacgggcccaaatgcaacaccatgatgtgggccagttcgtcggtcatgccttcggacgagtagaaatcgcccacgaagtcaacacccatggtgtcacggtccggcaccacgccggtttcctcggccagttccctcagagccgcgtccatgatgtcctcgccctcgtccatgagaccggcgggaagcccgtaggcgaacatgtccgatccggcacggtattcgcgttcgatgaggtaacggtcggtggacatgtcgtgcacgagcatgaccacacagggggcgtgacgcagcacctggcggccgatctcgtgttccttgccctgcttgtcggtcagagcgatgcgcatgtcgtccacgtggaagatgcgcccggtataaacggtttcgctactgatcactttggcgggcacgtccatgtcgatgccgtccgaggaggcgttcagcttatggtcgagccgatgctccagttgttcctgcttgcttcccccaaacatgtcatctcctcggaaaaaacgttttcgccacgtcactatagcgccttaatcccgatgcgcggtaatggacagcgtccatggatcggtcgtgtcgtggaaccactcgacttcaggccttgctccggtcgcttgttcgatggcggctggcacgtcatcgatcgcgtagttgaaccacatggattcgatggcggcatgaggggtgttgatgaagcagggacgcacatggctctcccccgccattccatggccgagcatgatgccttgggccctcatacgggcttcataccgggcttgttcgatggcgtcggtcaccgggtggtgacgcaaatcgctggttacgtacacgtccgcaccggtggcacgcacctcgttgaacagggagtcaccggagccaggcagaatggccacatactgaacaaaagtgtccgaatcgccgcatacctggatgccgagcgcggtggtcatgccatgatcggacacttcgtcgaatacacgctgagcgaaatccttcagggcaacaggcttcggcaaacgacccacacgccccaagccgaccggatgagaggcgtttgcatcgtcaatcggcacgagtggtttctggtcgatgagtccgaagtagtcggccgccgcctgccccacgccgcgatacgcagcgtcggcattggtgtgccctacccacagcccgcagccgtgctggtagagcctgcggacgatgtcgccccggaaaccgagtccgctcgtctcgtgtacggaacggaagaacaacgggtgatgggtgatgagcaggtccgcgccggtggcgatggccttgtcaatgatggcggaggtcgggtcggcggcgaacacgatgcggtgcacgtcgtggctcagatcgccgacgatgagacccggctcatcccattcctcggcgtagcgcaatgggtacagggtctcgagaacgtcgatgacttgcttgagattcggcatatgtcccattgtagtgggctattgcggcaagggactcattctgcaattgcggacaagccatgctcgtgctcttcattgctcgactatcggctcgccttcgcctacaaacaatccactggactgtttgctcaacggctcagcctcctcacccgaggggagctagaaattgtcagtgtgcagcgagctgccagtcggaaccgataccgcacgatacgtccagcggcacggcaaggtcgacggcgtgttccatggcgttgcgcaccagttcggtgacctggtcgccttctcccggcgcgatttccactaccagttcatcgtgaatctgcagaatgatacggctcttgacgtgggcctctgccaaggtctgctcggcgcgaatcatcgcgatcttcatgatgtcggcggcagatccctgaatcggtgcgttgagtgccgcacgttcggcggcctcacgcgcaacacgattggtcgaatgcagggccgggaagtagcgacgccgtccgaaaatggtttccgtataccccttctctcgggcattggccaccagcgattcaaggtaatcgtgcaccttgccgaaggtatcgaaataccggtttttcaacgcttccgcttcacgtggcgcgatcttgagctgctgggcgagaccatacgtgctcagaccataggccaatccgtagctcatggcttttacgtggctgcgctggtcgccggtgatctggtcgaccggcagcttgtagaccatcgaggccacgtatttgtggaagtcggctccggagcggaacgcttcgatcagcgcctcatcaccggacagatcggccatgatgcgcagctcgacctgtgagtaatcgcaactcatcagggcctcgtacccctcccccggcacgaacacgccgcgaatctcacgaccggcggcgttccggttgggaatattctgcaggttcgggtccacggagctcaatcgaccggtggcggcaacggtttgctcgaaagtggtgtggatgcgctcatctgatgtgttggtggcatcgatcagcgtttgaacgatctgcttgagcttgttgatctctcggtggcgcagcaacgccccgaggaaaccgttggcccgctcattgtccactgatttgacatacagatcctgcaatgcggccgcattcgtggtgtatgagccggacttggtgcgtttggtgggcttcaaacccatatcttcgaacagcaccttctgcaactgcttgggactttgcaggttgatttcggtgccggcatactcccaagccatttcctgcgcctgacgagcctcggcggcaaactggtcacgcatggaaacgagtcgaacgctatcgactttggctcctgtgtgctccatgccgtgcagcacgcgggaaacaggaagttcaatcgcgcgcatcagccagcattgttcacgctcgtcgataatcggcccgagcgtgacggcgaggctgcggataatggccaaatcgcgcagacgatgttcgttcggatcttcttcgacctgatcgtcatcgaagtccaacgtgccttgcgaaggctgttcggtttcggtgaagtggatgtcgaggaagtgctcggccgcctgcttgaggctatcggcgtggaaatccggttgggccagatacccggcaagcttggtgtcgaacatcggcaggtccatgtcaagatctaccgcgcccagaagatgcagcaactctttatacccatgcacgatggtgcgggagtgctcgctttccaggaaccgcgcaagctgtgctcgcagggtatcggtgattggaaggggcactatggccgctgatgttgccgtggccacggcaatggtttgtgccgtggcacgccccggcctttcgtcgccccacgcggccacggtccaagcgcggccgaccgcgtcgccgcagacggcatgccgctgcgatccatcgccatagtcggaaaccgtgaaatcggcgatttcaccgggaactttgacctcggcgcgatgggccttgacccattcgtcgaactgctccgaagaggtgatgctcgtgggttccggcaggttcagatcgagactgttatcctgctcgtcctgttcattattcgtagactcgccggctccgtatgtgttggaaaccttggcaccggtattgaaggttttcagtacacgactcctggtacgcggtccgaattcaagctccttgaacagggcgtcgatttgtgccacgtccacggtgccgaatgtcagatcctcaatatcgacgccaagatcgacgtctcgtaccagtgcgttgactttgcgattgagcttgacctggtcgatattggcccgcagcgattcgccttttttgccgccgatttcatcggcgtgctcgcaaatgccgtcgagggaaccgaattggttgatccacttggccgcaaagccatcgcctacaccgggcacaccgggaatattgtcggcggtttcgccgcggagcgccgccagatccggatattgtgcgggagtgactttgtatttgtcgatgatggactgcggcgtcatatgcttcaggtctttgaagtgatggcccgggtacaacacggtgacgttgtcatccaccagctggaaggcgtctcggtctccggacaataccagtgtgtggtagccggccttgtctcccatggtggcgagggtggcgatcacgtcgtcgccttcgaatcccggcttctcgatgtaggtgacgccgagggccgtgagcatgcgttgaatcaatggcagctgggtgagcagctcttcgggagccgcctcacgggtgcctttgtattgcggaagcatctcattgcggaatgtgccgcccttcacatcgaaggcgacgcccagatggtcggggttctccgcatcgatcacctgcgcgagcatggtggcaaaaccccagacggcgttggtggcctggccgctggaagtactgaagttgtcgaccggcagggcgaaaaatgcacggaaggccagcgagtggccgtccaccaccagcaatgtttcattggtgggtacggtcacgctggcctctcccatagtgtgtttgtgttgctttacgactcagcacggtgatgccgataatcagcgttcgcccgaatcagaaggcttcggatcgccgtacttggcgatgatggcctgagccaggcgcttcttggggatgcgctggtccatggaggtcttctgaatccaacggaaggcaccctgctcggagaagtcagccttgtccatcagcagacccttggcgcggtcgacgagcttgcgctcctcaagcgtgtcttcggccttcttgagcttctcttcggtttccttgagctggtcggtggtttccttgagcttgcgttcgctgcgctccacgttgtccagcagatcgttgatctcggcgaaacggcccatggccacctcgagggtcggcagcaacttggattcctcgtacggcttggtgacgtatgccatggcgccggcaccggtggccttcttcaccagatcggtctgggagaatgcggtgagcatgacgacaggggcgatattctcatcgcagataatgccggcagcggcgatgccgtccatacgcggcatcttgacatccatgcacaccacatcagggcgatacttgcgggtcagttccacggcttcctcgccgttggcggcctgaccaacgacctcataaccgttgtcttccagcatggcgaccagatccatgcggttcacggcttcatcctcggccacgacgacggtacgcggaccatcctcggccacggccttgcgctcagcaggttcgctttcatcggctacggccttgagttcttcgtcggtcagcacctcatcgacgttgatactcggttcttcggacttcttccttgcagccatgccaacctctttcttgaattacccaacaatggggttcgtaataatttcagcgaactcctagctaaagtgccctcggtgggactcgaacccacactgcgcagattttgaggctgcttcctctaccaattgggatacgagggcgtgcctaagcactctgaagagagtagcataccgattcgactcctgcgacacaagacacgcgccagtcctccattcccccggtaaaacaggcgaaacacgtcgatatcgtggacggcgtacccgtgtgttgcccgttcttctgcgtggtttcaccgcttacaatgggctgtagtttcgatgtatcgcttttgttaggagggcttatgagcaacgaaacttaccgtcagttcgatccctggcgcccctctccggtcaaggagatttcccgtagacagattgtggagacgcattatttcaatgtcgatcacgtctcctatgagtcgaatcagatcggttcgtttgaacgctactttgttcaggagaacaatggcgacactgtggctgtgctggccgtcaccgatgacggcatgattccgctggtcgagcagtatcgcatcgccaaccatcgttggacgttggagattccggcaggccacgccaacaacccgtccgaacgcccgaccgatgtggctaagcgcaagctggccgaagaggctggtttcgatgcctccaagcttacgcagttcacccgttttatgaacacgccgagctattccacccagcacaccgcaatcttcttcgccaccggacttaccccggcttcccgtcaggaaatcggcccggagactccgcgttccgacgtgcgtatggtgtcggtggacgatgcctatgagatggtggtcaatggcacgattgtggatgccaagaccatggtcgccattctgcgtctgaagagcggcacgctcgatcatctcaacgactagtcaccacgctcgatcatcgcggtgactacgtgccattgcaatcaccgcacaatcgcaacataacggataacgaaagccccccatccactttctggatggggggctttcgcgtgctatgtgctagctgtcagcagctaccagcggcctgaaatcagtcgcaagcgccaacggtgtgcacgtagatggagtcggtgcggcccggctggtgatcgccctgagcagagctcaggatgacgatcttgtcgccgtcagcaaccttgccggcgtccttgaggatcttgtccgtgtagatcatcagatccttgcgggacttgtcgtggtagtcctccttgagcaggaaggcttcggtgccccaggacagagccagccagtggtaagtgtgctcgttgctggtcagaccatagatcggggcggccggacgctcacgggagacgcggtggacggtggcgccggtctgggtgtaggcgacgatggccttggcgttgagcttgtcggccaggtccacggcggcggaggaaacggcgccggtggaggacatgtcgaggttcttgagctcggggatgcggtcgaagccgtggtcggtggcgtagccggagatgcgcgacatggtggccacggtcacatccgggtacttgccgacggcggtctcgttggaggtcatggtggcgtcggagccgtcgaggacggcgttggcgcagtcggaggcctctgcacgggtcgggaccggggagttcaccatggagccgaggacttcggtggccacgatgaccggcttggcatactggcgggccagctcgatgatgcgcttggtggccagcgggacctcttccagcgggcactcaacggccatgtcgccacgggcggccatgacaccgtcgaaggtcttgacgatctcttcgaggttctccagagcctgcggcttctcgatcttggcaacgatcgggatgcgacggccttcctcgtccatgatctcgtgggcgcggtcgatgtcggtggcgaaacgcacgaaggacatggcgatgatgtcggcaccggtgcggatggcccaacgcaggtcagcctcatccttctcggtcagggccggcagggagacggcgacgcccggcaggttgatgcccttgtgggaggacacaggaccggccacgacgaccttggtgtacacgttgttgccctcgaccttggtgacctcaagacggaccttgccgtcatcgatcaggatcgggtcgcccgggtggcaatcgcccggcaggcccttgaaggtggtggaggtgatgtgctcgtcgccctcgacgtcatcagtggtgatgacgaattcctggccgagctgcagctgaaccttgtcttcgccatcggcgttcttcttgaaccaaccgcagcgaatcttcgggccctgcaaatcaacaagcgcggcaacgttgcgaccagtggcttcgctggccttgcgcacgttgttgtagaccttgaggtgatcctcgggggtgccgtgggagcggttcagacgagcaacgtccataccggcttcaacgagcttcaggaggttgtcgtaatcctcggtggaaggaccgatggtgtctacgatcttggctttacgcatgaatgcctgcctattcttgttcaatttggttcgaggcacgattgccccatttgccgaaacccagtctactagcgcgagccgactcatgacaagttttcttcacggtgtgttgtgagcgctcacattgttgtgttgactgggtttaagggttgtattctctaacgatttcaggccttctcggcgctttccatgctcttcatcttgatcacggaagccacggatgcgccgccaattgcgaccacaatcacagccagcgacagccatgtgggcacttccggcacccaatggatgccttcgccgccgttgatgaacggcaaggtattgccgtgcagggcctccatgatgagcttgacgccgatgaagcccagcaccacggacaggccggcaggcaggtagacgagcttgtcgagcagagcacccagcaggaagtacagctgctgcagaccgagcagggcgaacacgttggaggtgaacaccaggaacggatccttggtcaggccgaagatcgcgggaatcgagtcgaaggcaaacatgacgtcggtggtgccgatggtcaggaacacgatgagcatcggggtccagtaacgcacgccgttcttggtggtgcgcagcttctcgccgtcgtagtcgtcggtgatcttgatgatcttgcgcagattacggatgatgccgttttcgtgatattcctcgtcctcatcgccgccgagcaccagtttgacggcggtgtagatcaggaaggcgccgaacaggaagaacacccatgtgaagcgggtgatcagggccgcgccgatcagaatgaaaatgccacggaagatcaaagcaatggtgatgcccaccgaaagcacgtacttctgaatctgcttgggcaccgcgaagttcgacatgataatgacgaacacgaacagattgtcgatggacaacgagtattcggtgagccagccggaatagaactcgatggcgggcctggagccggcgaagaaccagatgcatccgccgaagatcaacgccatgaccacgaagaaggcgatatgctgcacgcattccttggtggagggcacatgcggtcggcgcccgatgacgaacaggtcgacgatgaagaacagcgcgagcaccacgaaggtgatgatttcaaatgcgagtggggtttctgccatgattccctacactaacccatgtatgtgacgggtcatcgccccgcctcggtcatctgccggagctccttcttgagatcacggatctcgtcgcgcagacgggccgcgagttcgaactggagttgttcggcggcggtgtgcatctgttcggacagctggcgaatcaggtcggcgaggtcctgcgcgggcaggccggccttcaggatctcctcgtggcgtttgtctgcctcgttgggatcgagtaccggcacgcccaggtgtgtgttgccggccttgcccgcgttgcggtagccaccttcaagcaaggtctgggtgtccacatcctccttggcgagcatgtcgttgacatcgctgatcttcttgatcaggggcttgggatcgatgccgtgttcccggttgtaggcgatctgcttggcgcggcggcggtcggtctcgtcgatggcttgccgcatggcttcggtggtctcgtcggcgtacatgatcaccacgccggacacgtttcgcgcggcacggccgatggtctggatgagcgaacggtaggaccgcaggaagccctccttgtcggcgtcgaggatcgccaccagcgatacttccggcaaatcgaggccttcgcgcagcaggttgatgccgacgatgacgtcgatcttgccttcgcgcaacatgcgcagcagttcgacgcggcgcaacgtatccacatcggaatgcaggtattcgaccttgatgccgcgttccagcagatagtcggtcaaatcctcggccatcttcttggtcagggtggtcaccagcgcacgctcgttcctggccacacgggccttgatctcggcgagcagatcgtcgatctgccccttgaccgggcgcacgtcgatcttcgggtccagcaggccggtcggacggatgatctgttcgaccaccccgtcggacaagcccaactcgtagtcgccgggcgtggcggacagatacacggtctggccgacgcgctgcaggaactccggccatttgagcggtcggttatccatcgcggaaggcagacggaagccgtgttcgaccagcgtgcgcttgcgggaggcatcgccctcgtacatggcaccgatctgcggcacggtgacgtgtgattcgtcaatgaccagcaggaagtcatcggggaagaagtcgagcagcgtgtgcggtggggtgccggcggcgcggccgtcgaagtggcgcgaatagttttcgacgcccgagcacacgcccacctgggtgagcatttccagatcgtaggtggtgcgcatgttgaggcgctgcgcttccagctccttgccttgcttacgcagttctgccaggcgttcgtcgagttcctcgcgaatggttttgagcgcgcgttccatgcgttcggggccggccacgtaatgggaggccgggaagatgtggatttcgttttcctcgtcgatctcgtcgccggtcagcgggtgcagcgtggagatgcggtcgatctcgtcgccgaagaattcgatgcgcacggccagttcctcgtagacggggatgatttcgaccgtatcgccgcgcacgcggaaggtgccgcgcgtgaaggcgatgtcgttgcgcttgtactgcatggccacgaaccggcgcagcaggtcgtcgcgattgatctgctggccttccttgagaaacagcatacgcccggcgtattcctcaggagtgcccaggccgtagatgcaggagatggtggccacgaccacgcagtcgcgtctggtcagcaggttggccgtggcctgatggcgcaaacgttccacatcgtcgttgatgttggagtctttctcgatataggtgtcggtctgcggtatgtaggcctccggctgatagtagtcgtagtaggaaacgaaatagctcaccgcgttgtcgggcatgagctcgcggaattcggcgcacagctgcgcggcgagcgtcttgttcggctcgatgatgagcgtgggacgttgcagccgttcgatcagccatgcggtggtggcggttttgccggtgccggtggcgcccatgagcaccacgtcgttctcgccgttctcgatgcgcgtggccagttcctcgatggccttcggctggtctccggatggtcggtacggcgatttgaccacaaacggcttgtccacacgttcgatgttgaatcccatgcgctgtttccttccgattcacgctgtatcccgatgatatatcggaatatacgctaggcaactccaatacccgtcttcctcttggacgcgcagccaaccaccgctccgcgtaattgattgacgcagatgagacattccaaatcccatgcccaatgttctcggagattccgccaatgctccatccgccatcttggcgggaacgtcagccaccgatacgtacagtccgtcttgccgcacttgtatggcgagcacatacccttgttcgcgatccgcgtgcttggcgatattggcaaacgtctcttccagcaacgaccgcgtcaactggatagtcttctcgtcaaaccgactcaggagatcgaagggatcggacacaaccacctcgcctcggaaaccaagcgctgcgagttcccgccggtgccgttcgatctcggcctcgaatcgacctgcaccgatcggaacgatggcttctccggagcgacgcgcatggcatcgcgggattcgcgcagtaccgacattgtgctttgcgagaaccgctatgacatcatgcgtctgatcgagcgcccgttgagccacttcgcgcaacagtggcaagtccatcgactctccttgcgaagggtgtcccgacatgatcctgtcgatgctcatgatgagatatgagagatcattggtcgtcgcatcatgcagccttgccgccaaatccaacgattcggccctgccacgcgcttccgactccctctccccctcacgatgatgccaattcagcagcagaccgattccaacgcacgccaacgccggcatgacggtccaaggcacaacggacaccaacgccccggcatcccaacccatcggcaacccatactgccatatcagctgcgccacgcgagatacggtcacagtcaccgccaacaccacgccgcaccatatgcgttgataggagaggacgattaatggctcggctatcaccacgctcaccgacatggacagatccaccggcaaggggaacaccacgcaccatgagatcgccaacgcgatattgccgccgaacgggaatgccacgcagagcaacgacaggatgacgaacaacagacccacccacagggcccacgcatcccaaaccggattgatacacgattcgatgaccgtatcagcggctatgcacaaggcgcaggctagcgccgcgatcttctcgccatgccaagacttcccgaaatcgcggaagcgacgtctaagaaaacggctgccgtcacagaacatggtatcgctcacagtaatcaaggagttcgccgcgcctcgtcaccccgaccttgcgcatggctcgtttcacatagctgtacacagtttcgacaccgattcccaagcggcgcgcaatttcaacggtcggtacatgatgtgcatagagacgcaacaccgccagctctcgatcggagaagagcctggcaccatccgcttccggctgtgcggcatccaccgtatgcaatgtctcttcaaggctatgcaaaccccaaccatgagggtatgttcccccgtcaaacaccgatttgaccgcctcgcgtatggtcgctgcgaaatctcttttcgaaatcaacgcttgggctccgcaacacgcgatatcctcaccataggttgccaggtcatacgaagtgactacgatgacgccaacctgcacgttccgctgtcgaatacgttccgtcagctgcactccgttcagcccgtccatcatgagatcgcaaataaggatgtccggcttccgcggatcgaacagacaacgttccaaggcaagactgggattatccgtaacccatagcatatgcgcctcgggaatcgtcctgccaataagcaaagtcatcatctccgcagagcaacgatcgttgtccaccaaggcaagccgaatcaggcgcccgttcttcataagtaccccctccccaaatcgcctccgtcaaacgaaatcgtaacactgtgacgattcccgtcacacagacttcgttcgctcctcattggcgtcttaccgtgttatatgcggcaaaacagccgcgcaataatgtgcggcgagcgaacttcctatcgtccgccgcacaaacacattgttaccgggaataaggtgtatcatgcactggacttataaaatcgccagtatattggccgtggctctcatcactctcgcagcaggattctatgcgcagaataacgaagaaacctatccctccggccctagctacgatattggaatttccgacgcgcacgggcagcctctatcgacattgaccggtctcgcagcgacccatcatgtcgtactcgcgagagtctcctatgagccggacggtcacggtaccaacagacgcgtaatttctattttcggcgcattagacggcaacggcatgcatgcgaattcgccatacccggattatgggttcgggccgcgcacacgtgtgcaacgcggagacagattcaccgacccattgggaagatggcttctctatggatcaccacgggataccgcttcagtagccaaatccatacggcgccaaggattcgaacttaacagagcaacccccatcggcatcacacaaatcaccaaacaattcttctccaattccatcgcccaagtcatattcgccggacttgctgtagtatttgtgtccggcgcgctttccgtgtcgacagcttcacgcgtttgcgcgatacaagccttgcatggcatgagaacaaccggcattattatgaggcaattcctgcggcatgcgttctttttcatcatctgcgtctgcatcggatggatgacttggatttccattggtgcgatcttctggcctttcgcttctcccttaggattcgccggtcaggtattcctctccatcatcatcgccacaacgtgcatggcattggttgccttgtcattgtcgattgctctagtaagggttctggtgccgaacgcactcaaattaatccaaggaaagcgccctttacgttttctcatggcttccggctgcatcatggcaatcatcgttctcgctctcagctctgccagtttgaacgttacgaacttcaaatggcggcaatcccaaacactgaaaacaacattggagcatcaattgtcatccaacgacggattccaattgcaactgtggtatagcagcgatcaaaaccgagctcgttccatgccctcatggaacgacttcgtcgaacaaacttcccaatcagaacatacgcgattcgcctcattccgggtaggatgcacgtgggtggatagctcgcaagacccacagccctgcatcctcatggattcccgtacggcaaggcttcatcatcttatacgaaacaacacgacacttgcacgaatcagtgtgattatgcccgagaatgaacaatggaacagcgaatccattacgaacaatgtgcttcgcgcatactcattcgagcaaagtttggcggcagaagagggaaagagtctgcccgccatcaatcgcacgagcatctccattgaatccagaccaagagatgctgtcttatcggcatttgacaccccttccaacaccgatggcctttcctctgttcctgttgttgtcattgacccgtcactgctctctggcgataccactacatcgatggtgtccaccggcggcatgaccttcgattacagctcccgccatcagctgctcgaaatcctacgggaaaagggcgtggactctttggtggcttcggtcgtcaatcggcacgacgagatacaaactcgtttggcacgaacaactcaggaaatgaactatttttccatcacagcttgcatatccataacatgtctgctgggcggcgcaatcatggtggctttgacactatgcacactccgacgtcaaattatgttcgtggaatatatgcatggagcgccgtcatatctccgttttcaatcgatactgttcctagcagcggcgttatgcagtgcatctcttccgatccagttgctcataggaggttacaacgccgtttccacgacctcggtttccttactattcatcgtcgtttcgctggcaaccacagtgctttacgattcgcggctgcgcgccgacagtatcaaacatccctgatcgccatccacaaacctgtatcagcaatcacttaccacgtaaggaacatcaagcatgagcgccttattgatcacgcataatctgacatatcgaatcgacgaccgcaccttatgggaaggactgaacctgacattcagtcccggtgacatggttgccctgaccggagaaagcggatgtggcaaaaccactttgttgaatgtcctaggtcttttggaagagccaagttcaggaacaattacctatgatgggcaaacaattgcctccagaaagggccgacggctcatgcaccgcaacgtcatgggattcatgttccagaattacgccctggtggagcaatggacggtgaacagaaatctgattctggctctgcgcagcgtcggaataccatcggcagatagaagtcggctcatcagacgcgcattgcgagccgtgaatctgacgggctacggcaatagaccgatctacacactcagtggaggcgaacaacaacgagtcgcaatcgcgaggcttctcatccgtcaatcgctgcgcgtcatactggcggacgagccaacagcggccctcgatgccgacaaccgcgccatggtcatgcgtcacctgcgtgatttcgccgacaacggagcgatcgtgatctacacgacgcacaacgaggagaccgcggccctcgccgaccgcatcatcgcattatgattccgccagccactgttcgtacagcgcatcgacggcttcgagcattcgacccatcggctgcgtggaatcgatcaccgcgtcggctatgacacggcgttgttccgggctggactggtggcgaatgcgcgcaagcgcatcatctcgcgtcatgccgcgggtcgacaccattctgtcgacccgtacttgttcgggcgcttcgacggtgacgatatggtcgaatcgcatgggcatggcgtccaggacttccgccaacagcggaacatcatgcacgaccatggcatctggattgttcgcgaccgcctgccgctcccgagacagcgcaagatcatagatcaacggatgctcgatatcgtccagtttcctccgcaaccgttccgagtcgggcccggcgaacacgtgctcggcgatccatcgccggttgagccgcccctgatcggtcagcgcgtcggggccgaaacattccgctatacgacgaagaccgacgccgcccggttccaccactcggcgcgcgagctcgtcatagtcgataagcgccgcgccgagctcccgcagtcttgtggacaccgtgcttttgcccgccgcaataccaccggtcaatcctattcgaatcatgctccccccatcatgccatgtttcgaggttcatgcacacaacggcaaaacccggcccgccgaagcgagaccgggttttgactatacgtcaggcgtcagtcgcccgatggcgaactcacttgccgagcagctggtcgcgcagggcggcgagctgatcggagtcggcgagggtaccggtagccggagcagcggaagagtagttggaggtctcctcgaccggcttctcttccttcgggccctggccgtcggcggctgcggattcggcagcgttctccagctccttggccacgaactccttgtgctcctcccacagctcgtgggcggcggcgtactgggactcccactcctcgcgctgcttctcgtaaccagcgatccactcgttggtgttcgggtcgaagccttcggggtacttgtagttgccctgctcgtcgtactcggccggcatgccgtagatggccggatcgaagtcctcggaagccgggtcgacggagtcgttggcctgcttgagggacagggagatacggcgacgatcgaggtcgacgtcgatcaccttgacgaacacggcctcgcccggcttgaccacggtctccgggttctcgacgtgacggttggcgagctcggagatgtgcaccaggccctcgatgccgtcctcgacggagatgaagacaccgaactggacgatcttggtgaccttgcccttgacgatctggccgggaacgtgggtgcgagcgaagcgctgccacggatcctcctgagtcgccttcagggacagggagatacgctcacggtcgagatcgacgtcgagcacctcgacggtgaccttgtcgccgaccttgacgacctcggacgggtggtcgatgtgcttccaagacagctcggaaacgtggatcaggccgtcaacaccgcccagatcgacgaaagcgccgaagttgacgatggaggacaccacaccctcacgaatctggcccttcttgagctgggacaggaaggtctcgcggacctcggactgggtctcctcgaggtactggcggcgggacaggaccacgttgttgcggttcttgtcgagctcaaggatcttggccttgatcttctggccgatgtacggggagaggtcgcggacgcgacgcatctcgacgagggaggcaggcaggaagccacgcagaccgatgtcgacgatgaggccgcccttgacggcttcgatgacggtgccctcaacgacgccgtcagcttccttgatcttctcgatgtcgccccaggcgcgctcgtactgggcacgcttcttggacagaatcagacggccttccttgtcttccttggtgacgacaagggcctcgatggtgtcgccgacctcgacgacttcgtcaggatcaacgtccttcttgatggaaagctcgcgggaggggatgacaccctcggtcttgtagccgatgtccaggaggacttcgtcgtgatcgatcttgacgacggtgccctcaaccagatcaccatcatcgaagttcttgatggtggaatcgactgccttgatgaagtcctcttcggtgccgatgtcgttgatggcgaccttggtgacttcagtgttgttctctgccatgtaaatatatggtttctaatagtggatggataatttctcgatattcagttatacgcacacccttacaggcatacagatattcacaatacaagcaactctgcccaaatttcctaggaaactctaggcgtgtcgttcggccatttccacgacgttggccaggagcatggctcgggtcatggggcccacgcctccggggttgggggtgtaggcggaggccttgtcgtagcaggccttgtccacgtcgcccttgatgcggtagcgaccggcttcttcgtcgtagacgcggctgacgcccacgtcgaccagcacggcgccgtccttgatcttgtcgggcgtcacgaatccggccgaacccattgcggcgacgatcacgtcggcgcggcgcatgtggtcggccacatcccgggtaccggtgtggcacagggtgacggtggcgttgacggcgttgcgcgtgagcatcaggccaatcgtgcggccaatggtgatgccgcggccaagcacgcacacttccttgccgttcagatcaatgtcataggcgtcgagcagctcgagcacaccgcgcggagtgcaaggcaacggtgtcgaaatgtcgccgcgcacatgcagcaccagttcgccgaggttgtacgggtgcatgccgtcggcatccttggccgggtcgatcatgtcgatgatcgcgttctcgttgatgcccttgggcaacggcaactggacgatgaacccggtgcaggccggatcttcgttgagttcgcgtacggcagcggcgatgtcgtcgaagctggcgtccgccggcagttccttcttgactgaggtaatgcccacttcctggcaatcggcgtgcttgccggccacgtacttcatcgacccgggatccgaccccaccagcaacgtgccaagccccggctggatgccccgggccttgagcctgctcacccgttcggcaaggtcggtcttgatcccggccgcgattcgtttgccgtcgattattgtggacatcaacgccctcccctgtggtttcgatgctttctatcgaaacgataggctatcgttggaacaagtcaggattatatatcgttcgctctcacgaagaaggcgtgccatggggactcaaatcacacgacttacgcgactcgccgcagccggcctgagcgccgtcctgttgttcgcgaccgccgcatgcgcagccacctcccccactgaaaccgagccggacaacaagaccagtgttcccgcaccgaccgggccgatcaatgtggtcgcctccctcaatcaatggggctcgctggccgccgagctgggcggcgatgatgtggaagtcacgtccatcgtgaactccaccaatgtggatgcccacgatttcgagccaaagacctcggacgtcgccaagctgtccaaggcacaaatcatcgtggccaacggtgcgggctacgattcctgggccaccaaatcgatgaccaagaccacgaatatcgtatccgccgcttccgtcatgggtgccatggaaggcgataacccgcatctgtggttctccaaagacgctcgatccagcatggccacggccatcaccgatgcatatgtaaaggcactccccagcaagaagaaggccttccagaagcggctcaaggcatggcaggcggatgagaaatcgctggaaacatgggcgtccgagttcaccagatcccactccgacctcacctatgcagccaccgaacccgtggtctattatctgatggccgatctcgggttcaagaatcagacgcccaaggggtatacgcaatcgaccgcttccggcggcgaaccggcccccgcggacctgcagtctttccagaaactcatcgaagacaagggcgtggatgtgctggtcaacaacacgcaggaagccagtgacgcgaccaatatgatcactggcgctgccggtcgtgccgatgtgccggtagtcgacgtctctgaacaaatgcccaaggataccgacacgctgaacgcctggatcaatcagctcatcaacaccatcatcgacgcggtggatccgagctatggctgcgaagacgccacggacggcaacgcgaattccgatgattccagcgccgacggcgccgccgcggatgaagccaatgcgcaagattccaaggccagcaccggttccagcacggagcccaagtacatccgtcagtgcaaggcggccacatccagtgattcgtctcaggattcggcaaaggccgatgcctccaatggcgattccggcgatgcctccggcaacgaccagaccgactccggcaaatagttagaagcaaaggacaacggcatcggattcatgcaatgccgatagacgccttgcacgagaagggttgtgcgaccattgtcgagatggccgcacaacccttttctttggttgtcaccatccgtacacgatattgagaacgattgtcagcatcgtttgccacaatcgggcgttatgagtgaaacttccgattgcatcgtgttcagcgatgccgccatcaagcgtggtgaccatatcatctggcagcatggcacctttgccattcccaccggttcggtcacggccatcgtcggcaccaacggcaccggcaaaaccacgatgatgagggccgagctgggacttttgccgctttgccatggcagcctgaccgtactgggcaagcccgcaggcgagatgaacaaacgcatcggatatgtgccgcagagctatgtggcgaatgtcgattccaatctcaccgccgaacaatccgtgttgctgggcctgaccggcacccgattcggcatccaccccatcaccaaggcccagaaagccaaagcgctcgaggcgatggagttcaccggcatcgccgacaaggcgcagtaccgtctgtccgaactgtccggcggtttgcgccagcgtgtggccatcgcccaggcgttggtgtgcgatccacaactgctgatgcttgacgagccgttggccaacctcgatctggccagtcaacgcgccaccgtacacgtgctggccaagctgaaccgtgaactgaacatgaccatccaagtggttgcgcacgatctcaatatgctcttgccgattctgaccggtgccgtctacttgctcgacgggcacccgcactacgccgatatgcacaaagtgctcgactccgacctgctcacccacctctacggcacacaggtgcaggtggtcaccactccgcagggtgacatgttcgtgaccccgacgccggatgagccccaggaccagccgcaggatatgcacacggcagccgaagtggcgcaattgcaccatcacgagcacggcaacgccaccaatggcagtgccgccaacagcgccgagaatcgataacatcaagctagccgatccacagcccgtcaacgggctgcagctcaggcatggagaaaatacaaggacatgagcaccatcaacttttcgtacgatcccgaatggctggacacactgtccgctccattcatgaccaacgccttcatcgccggcctgtgcattgccctggccgccggtgtcatgggatacttcaccatcgcccgtcgttccaccttcgcggcccatgcgctggcccatatcggtctgccgggcgcgaccggcgcggtgttgctcggcctgcccgtatcactgggcatgggcgtgttcgcactgggcggcgcactggtgatcggtgctttgggcaagcgcgtttccgagcgtgaaatcgcaaccggcaccgtactggccttcgccaccggcttgggtctgttcttcgcgcgattgtcgagttccgcctcccagcagatgcagtcgatcctcttcggctcgatcctgaccatcaccaccggccagatcatcggcttcgccgtgttcgacgtattgctgctggcattgttggccatcatctaccgcccgctgctgttcagctcgttggatgagcaggtggcacaggccaagggtgtgccgatcgggctgatgaacgtggcgtttatggcgattatggccggtgtaatcaccattgccgtgccggcagtgggcaccttgctgattttcgcgctggtgatcacgcctgcggccaccgccaatattctggccggctccccattcaaggcgatggtgatcgccagcgtgctgtgcctggtgtcgatttgggccggactcgtgctgtcggcgatgttccccgcccccccgagcttcattatcgtgacgctttccaccctgttctgggctatcgccaaggccgtggagacagtgcggaagtaatctcattcatttttcttgcccccgctggcaaattcacagcgggggctttgttatatcttctccaccaaggcattggcgatggcggcgatgccttcgccgcggccagtgaatcccatatggtcggtggtggtggcggtaaccgataccgggcaaccaaccgccgcagacagggcggcttcggcttcagcacggcgtgtgccgattttcgggcggttgccgatgatcgccaccgaggccgatgccggcgtatacccgttggatgccagatgcgccacaacttcttgcagcatatcgatgccatgccttccggcaccatgcgcgtccgcaccgacaccgaacagtgaaccaatgtctcccaatcgggcggcggcaagcaacgcgtcaatcagggcgtgcgcggccacatcgccatcggaatcgccttcgataccctcgtatttggcggcatcggcctcgctgcatgaatcagacgccggccagtaaagcccggcaatccacagttcacggcctgagccggcaggcgcaaaacggtgagcgtcaaaaccctgccctatcaacactcctgcagaccccatgcagtccccttcgatggcattgcccagatgaacggcagcaaacgattatgaatcacgaagccccggcgcatcgcataaggacacgaccgaggcctcaaaacaatcaaatcacttcttcttggacttcttctcggcttcgacacgagccaaagtatcggccgcggcctcttcgggctcggcggtgtgatgcttgtcgtcaccgggctgagcgggctcgtagcccaggttcacgtcgagcagacgctgggcttccgcctcgtcgatcttctcggacaaggcgatctcagaagtcagaatggcgcgggccttggtgagcatacgcttctcgcctgcggacaggccgtgctcgtcgacatcgcgctgggcgagatcgcgaaccacttcggcgatcttgttgacatcgccggtggcgatcttttcgacgttcagcttgtaacggcgagaccagttcatctctttctcgatgatcggggtccgcaggatgccgaacaccttggccacttcggatgcggagacgatgtcacgcacgccgaccttcctggcattgtccacgggaacgttgatgaccaaaccatcggaagagagtacggacagctgcagatattcgcgcgtcactcccttgaccgtccgctcggtaatggcctccaccttcgctgcaccatgacgcggatagacgaccatatcgccgactttgtaagacatgtaccctccgagaactgacggcttacacacaaaaactcgaataattatgccatgcggcctggaccgcccctatgagagcgctcacaaccacggagacacaccgagaagggcaagaattcgccattttcgacgcgccaatgtagcgttttcgactccaacgcacgtagactttgggtcatggctaaagaaacgaagatcaaggaagataccgtcaccgtgcctgtcgcccaaggcgacctcgatgcggtgagcaatgctgaattctacaacccccacggagttctcggcgggcatctcggcatcggcaagcatgccgacaccgccacaatccgtgtgctgcgtccgcttgccaagtccgtgaccatcctcacccaggatggcgaatacccgatgacccacgaatacaacggcgtgttcgtgactaccgtgccggcctccggcaccaagaagcagcccacgattcccgactaccgcgtcaggaccgagtgggaaagcggcgcagtgctcattgaggacgacccataccgttatatgcccacagtcggcgacatggacacctatctgttcggcgagggccgtcacgagaagctctgggaggcgcttggcgcgcacgtgctgcgctatgacgatccgatgggcggcgcagacggcacgcccggcgagcaggtggtaggcaccgcgttctccgtgtgggccccgaacgcccatgccgtgcgcgtggtcggtaacttcaacgcctgggatggccgtcgtcatgccatgcgcgagctcggctcctccggcgtgtgggagatcttcatccccggcatcggcgcgggcgagacctacaagttccagatcctgaacgccaattacacgtgggagatgaaggctgacccgatggagcgtcagcacgaggttccgccgaacaccgcctccatcgtcaccgaatccacctacgagtggaacgatgacgcctggatgcagcaccgccgcaccaccaacccgcatgatggcccggtctccatctatgaggtgcacgccggcagctggaagcagggactgacctaccgcgacctggccaagcagctcgtggactatgtcaagcaggaaggcttcacccacgtggagttcatgccactggcacagcacccgttctccggctcctggggctatcaggtcaccggctactatgcggtggattcccgcctcggctcccccgacgacttccgttacctggtcgatcagttccatcaggccggcatcggcgtgatcatggactgggtgcccgcccacttcccgaaggatgccttcgcactcggccgcttcgacggcaccccgctgtacgaggacccggacccgctgcgcggcgaacaccccgaatggggcacctatgtgttcaacttcggacgccgcgaagtacgcaacttcctggtggccaacgccctgttctggctcgaggacctgcatgtcgatgcgctgcgcgtggatgccgtcagctccatgctctacctcgactacagccgcgaacccggccattggcgtccgaacatctacggcggacgcgaaaacctggaggccatcgacttcctcaaggaagccaccgccaccgcgtacaagaacaaccccggcgtcatgatgatcgccgaggagtccaccgcatggccgggcatcaccgcccccacctccgccggcggcatcggcttcggtatgaagtggaacatgggatggatgcacgacaccctcgagtatctgcacgaggagcccatcaaccgcaagtggcaccacaacgaaatcaccttctccatggtatacgcctactccgaacactacgtattgcccatcagccacgacgaagtcgtgtacggcaagggctccctgtacggcaagatgccgggcgatggctggcagaagctagccggcgtgcgttcgatgttcgcctatcagtgggctcacccgggcaagaagctctccttcatgggcaacgagctggcccagtggggcgagtgggatcacgacgcctccatcgattgggattgcctgaactggcaggagcaccgtcaggtccagaccatggtcgccgacctcaacgccttctacaaggcgcatccggcactttggagccaggacttcgatccggccggcttccagtggctgaccagcgacgatgccgaccacaacacgctgagcttcctgcgcatcggcaccaagggcgagaccttggccgtggtggtcaacttctccggtgaagcctggtccgattaccaggtggcgctgcccaccggcggcaagtggaccgaagtgttcaccaccgatgacgccaagtacggcggctccgacatccacaacggcaccttcgaagcggtcgagggcgaatatcattcgcgtccgttctcggcgaagatcaccgttccggctctgggagttgtattcttgaagccggaagactgaactggtcaacaggctgaaaggtaaccggtttatttatgctcaataccacagcgcgtcagaatacgacaccgcgcatggtgctggtggtcgaggacgagcccacactcgccacggccatcgcccagcgcatcaccgctgaaggatggaccgctcgcgtggccggggacggcgcttccgccgtccaggccgcgtcccagctacgccccgatttggtaatcatggacatcatgctgccggtcatggatggtcttgaggccaccaaacgcatcgtcgccgaacgtccggtgccggtgctgatcctcaccgcacgtgatgacgaggccgacaaggtcatcggtctgggagcgggcgccgatgattacatgaccaaaccgttctccatgcgcgagctcatcgcccgctgcaaggcgctgctacgccgcgtggagcgtgcgaaggtcatcgccaagaattcggagaacgagaagctgctcgacttcggttcgatggtcatagacccggcccagcgcatcgtcaccgtgaacggcgagcaggtgcatctgacccccaccgagttcgatctgctggccacgctggcccgccgcccgaagtcggtgctcacccgcgaaaagctgctcgaagaggtctgggactgggtcgacgcatccggcacccgcaccgtcgacagccacgtcaaggcgctgcgccataagctcggcgccgataccatccgcaccgtgcacggcgtaggctacgctttcgagccgccgaccgcgtgatggcatccaaaaaacaacagcaatcccggcttgatgcgatgaaacctcgcgtcaagccggttgatttgttctcctctctgaagctggaactcagcgtactgatcgttatcgccactgccatcgcgtttgccatgtgctggttcctcctgaaattcggctggtccggttggatcgccatgccgctgactttggtggtggccttgggcatcacctatttcttctcccgtggcatcaccgctcccttacgccagatgcgcgatgtggccgaagccatggcggatggcgattacacggtccgcgtggatatcgatcaggatcgtcatgacgaggtcggccagctggctcgctcgttcaacgagatggccggcgaactcgaacatgccgataaaatgcgccgcgacatgatagccaatgtgagccatgagctgcgtacgcccgtttccgctttgcaggcgatggtcgagaacatggccgacggcgtcaccgagcccactcccgccaatctggagagcatcctcacccaaacgcagcgtctctccgacctcatcgccttcctgttggatttgagccgtatggaggccggtgcggcgagtctgaatatcgaaaagttcaacttcgccgactttcttgacgagaccatcgagccgttggaaatcgccgatggcggccacgcccacgacatccgcgtcaccgtgccggccgacatctcgatggaaggcgatcaggaccgcctgcgccagctgttcaccaacatcatcgccaacgcgctgaagcattcggccgacggcaccaccgtgctggtcgatgcccatgaggatgacagccaaggcaccatcgtgaccaatgtggtgaatttcggctcccagattgcaccgtccgaccgttcggatatcttccggcgctttgtcaaaggcaagacgggtcccggcaccgagtcgggcggcaccggccttggcctgtccatcgcacgttgggcggcccaattgcacggcggcaccgtcaaagtggtcgatgacacgcgaggcgccgatttcgaaatcatcctgcctaaatatcacgtcgccgaacgctgatattgtccgccgtcctaccgtatactgtattcgaacagatgttcgaatacagggtgggaggcacagcatgacacagcaatccaagtcacgaaccatgccgcacgacaccacgctgtttgtcatgcagatggccggcgattccatgatcaatgccggtattcataacggcgatctgctgattgtcgatcgttcgttggcaccagtccccggagatgtggttgcggctgtcatggatgacgaaatcgccatcaagcggctggtttcacgggccggcatcaccatattgcacgccgagaatcctcgatatcccgattacatgccgagcaacggcgcttcgcctgctatctggggcatcgtcaccgatgtcattcacccgttgatatcgtcatcggaccgtcgcgccacggcatccgccaataccagcacgcccaccactttagtaccggcctgctgaaatgtctgaacgcattgccgcacggtggcacctgtggtgacgatgtcatcaatgagaagcaccgcgtcgccatggcctatgagatcacgcttcaccctgacatgaccggtgatacggcgggcacgctgtgccgaagaggtctgctgcacggagcgtgccttggtggaggagctcagggcattgcatggtcgcgcatcgacgccgtacccacgcaatgcccctgccaccgatttggccaacggtgccgtatgggcacgccctcttcggcgcattgacgcccgcgatgacggcaccggaaccaccaatacgcgatgccccaagcatgatgatgatattggcgtcttgttcagcagcgacaccatgatgcggccgaaagggccgtcaagctcggtatcgtcgtggtccttccagtcgagaatggcacgacgcgccgctccctggtaaatcgatgcggaccatatacgggctccgccaccaccgtctgtatcccgctcccggcattgtgcgaacaaggcccgacatgccgcacacaatacctcatccggcgcgtcacacccagcgcagccgcgtggaaacagcagattgcagacctgtgcccacatcgcatgccaccacttgtatacgctcggaccgtccataacgcgtcaccatcaagctggagtatcgaatcgcgcaagcagtgcatccagcagttgtaccgtgtcttgcggattctccacacgaacaccgatcgcaccggcctcaaccgcaggatagtcattacccgtaggcgtcatgcgatcgcccacgaacaccatttcatcggcccgtatgccaagtgtctgcgtcagcttgcgcacggcataggccttatcgatgccgcattcgctgacatccacactggtgtagccgccggccctgacccgcatgtgcggcagatcggccttgaccgcttcgaccagcgcctgtttcttcgtgttatcgcgatcccatgcctgtttggccgctacgggtgcgaactgtcccagagcggagaaggtgatctggctgcccctgttctcgattcgaggcccccatacctgctgttcccacaatcccagttcccgggcatgtcgctcaagactttccgagacagcggccacggtggcttcggacagatcatgcgcatacaccaaggcccattgcgtgccatcccaccggtaataccgggagccggaggcaggcatgacatgcagattgccgcgcctggcattcggggtgagtacatccagcacctgtgaggtgaccaccgccatgccgccccctgagatcagggccaccaccgtatggtcgagcagcgcacagaaccgttcgatcatcgcgggcctcatcggctgttttgagctggccagcgtgttgtccaaatcgaaaccgaacaccttggcgttggagcagacattatcgaaatcaagttcggaccacgaacgtaccaccatttgtcgcgcctccctcgttgacgaatgttcacagccaatgaaccaatcctaacgcatgttgcctccgccatgtcctatggtgggaaccatgcttcagccaccttggaacgcacgaatctaccgcaaccgccacggtcgcggcacacgaaccccgatgttcggcacccgtctgccccgttaccgcactcgcaccggcatgttcgacgatatggtggcggcccaggttcgcaggctcggccaagcgtggccggaactgatacgtccgctccagttcgcggtggaggatgtgccgccttcggatccgacgccttggcagaccgagccgaatatgacgtcccagtgcttccccgccagccacggcattcccgcacgagtcgtgctctaccgtatgccgttgcagaccgaggcacctaccaagctcgaattgcagttggccgtcagggatgagctggtggcccgcatagcggaattgtatgggcgcaggcccgaggaaatcgaccccgattggggcctgtgacagtattgcgggggccgtgccacttcaagtaagacagtggcacggcccccgcagctatatcggcgccgaaacatcatcagaccgatgcttcggcgagcgcgctctacttgacgatggaggaatcgttccgagcccagacatggaccgtggcgggcatcagcgttgaagcgtcgatggcggacaatccggcgatgtccttgtcttgcaacgaatcgtgactgaaacgcgctccccagctcactttcttggatgagtcctccaacatcagcacgaccgcggtgccatgatcgccggaaagtttgccggtctcaatcgtttgcgccgcgttcgcatccagcgtgatttcctcggaggtcaccgaagcaccggcatcatcgtaggcgtgcaaggtgaccgtcctgcgcgcattggatgtattggccagcgtgatggaggcctttactccgtcgggaagggccaaccccgagaattcggatggctcgccggcattgaccaatgcgaaatcggcttggccggagtcaccggagcgtgtggccttgacggagaacgacacggcatcctctgcggtggacatcacgcccaacgccccatcaggagcctctcccaagtcgatcgccgtcaccttatcggcagtgacggtggcatctttggcgggaaccaatcctttgtcggtaatccatgacagcccggtgctggtgtctgccttggcgaacagataagcggtgaccgcatcgccggcagtgatggacggcgccaccgacgcattggaggcggtcggcagcggcagcgcgaaatcagaacccttcggtgtcagaccatccatggtcaccgtacgtaccacggacgcgataggagtctccttgctggaaacggtcacgaacagaccatgctgcccatcgaccgcggcggacagttccatcgaggactccccctcggccggcacagacagcgtggattgtgtggacaatgccattttcccggctgtctcggaaccccagacggcaatgtcgacggtggtcggcttggtggagggattcgagacgatgagctgctgtgtggtaccggtcgtgccgccggagagcaggaacgactggctgagcgaggtcgatacgcaggatgccgccgatacgcctctcacatcgccgtcatcggcccatgatgcgatggtgccgacggtgccggtgccagctgcggcctgcaacatacgggtattgatcaggcgagctccctgattgatcttctgagcaccggttttcaccgaggaatcgtcggtcggatcggcgtctttcaaagtcacgtcatctgaactggacttttgcccgatcgccgagacagtggcgctgtagacggagccgaacgccgcatagcgcgcctgtgtgctcagattgccgacagtggcctggaaggcgctgtcgccgtacgtgccggtatcggccaatcctataggtgccgggcagtaggtttcggactgggtcggactaactgtctggtcgatggcattatcggaagcggccaccttgtccacccagatattggggatgggggccatgacgagaacgacgaacagcgcaatcaacaccagcatggtgatcacaccgagcacgatgccgatcgcacgtttgaaaccagaagttttgttgctcatgcctgctcctccaatccgtaggacggtcgtctgcgaggcatggcgaccaagcagtacaacgccgtgatcacacctaggcatatcagccagacgtgtctccagacactatgctgtgcacgttgctgccatgaggtatccacctgctgtgaggtgctgctacgcagcgtcagacgatagtagctgccgctatccgtggagaccagggactgggtgccgttcgatgcggcgatattcgcgctcaactgttcatacggcatgtcgttcgaggaatcgccggtctcgggaaccacgtagatgccgccgaatccaagcgcgctgatggccgcgatggcctcttcgtcgggattggacagcagcgaggcacaggcctgggccagttgttcgtcaaccgcatcatgcttgccggacagcaggcgcgcccgctggaccggggaactgtcgatcagatcgccgcgcggggtgcgcatcaccgcatagttgacgatgttgcgggtctccgcactcacggcaagcacacgatgatcggcactggcttccagataatcggtggtgaccatgggcaggccgttttcggacacgcccagtcccgcatccttatgacgttcgatgccatacatgcattggatgccaatgcagcacaccagtatcagagcaagcaccacacggccagacacgatgagcacatgcagacggtcccttttcggtgcgggatcgctgccggacgcatgcaacggttggaatcgcttcaccgccccaccggcgacgaggcacacgcaggcaaggaagcccaatatcatcatcgcgatgccaggctgtgcggaaccggccacgacgccatcagcatccacggctatggccacacggctggaaatcagggcgagcgcgcctccgcaaacgattaccacccacatcagccgcgaggtccgcaacgcgaacggcagcaccagcgaagcaagagcgagcagcgtgatggcgacgagcagcacagtgaccgccaaatcggcatgctcagtcgatcccatttgccatcccagcgcacgctgtgcggcctcaagcaggctcagcgacgccggcgacccgttggcggatgacgttggcaccgtgatgtcgccgaacagttgacgccacatgcccaaatcggcgtaacgcaccgcattgacgagcgtaggggccaccgcaaaggcggcaggaaccggaataagcaacagcatggcgcgcttgcggcgcacgaacagcaggaacatcaggaacacgacgatcagcgcgaacagcagctgcggttcggcggccaccacagggatgaagcacagtgcggcgatggccgcggcctgaacggatgtgcgcggcttgagcgggtcttcggtatggtacatgcccacggcacggaacacgaatgcgaacgcggccggcaggaacaccattacggtgagcatcggcatattggcctgcgcataccagccgaacataatgccggtggatgcccacaacagtcctcccagcacgcgaaccacgtccgagcgggtgaatacgcccgccagcgcccagaacgacaatgcgctcagcggcgcggccacaaacagtatcatcgccagagcggcggtcacatggccgagcgtgaccagcgaggccagcatcagcaccagcagccacggcgtgggcggcgcaggaatgccggtgccgctgccaaacacccatggcgtggtggcggactgcaccagttgagtgaagctggcaccggtggaaagcaacacatcggaatacaacgatccaccggagaatatcgaacggaacaccggccaatacatcaccacgatggccgcaaagcacaccagcgccatcaccacggctgcgctccagcgatatatggtgcgtgtccgcagatgggcacgttccagcggactgagcagcactctgccctgctgggattggaatgcatcccgacgatcatggaactgcttgatctgccgactgtcggcgaacaaaacctgcagggacgatgcggcgaccttcgactgtctggccaccagcctgcgcgatttcatgtttcccgcgatatcggccaaagccaaccatggcaggcacaattgcacccatgcttcatacggcttcttgccgaacatcatggctatggccatgccaaaactgcgaatcagcctccacagccagacgataatccaggacgacatggccaggtcagtgtacagatagcgctgttgggagcgatgcaccgtcatcgcatgattgaccgtgtgatcttccttaagcggctccccgcctcgcgtacgaatgccctcataccgtgcgcgacgatgtgatatctccgcttgcgggactaccaccacgcgtccgccgttcaggcagacacggcggcagaaatcgaccgattcgctgtaggtggtcagccaggcattgatgccccgcagtcgcgtgaattgcgacatggacaccagcgcgcccgccagcgacaccgcgaacacatcctgtcgcccgtcatactgctcctgatcgggttctccatcgaccaccagggaatgcacggcgtgtcggcctgcatacataccgacatcatgcaggtgggatccttcccaatcacactgtttgcacccgagcacgctggcacccggcgtattgcgccacgcctcaagcaatcgttcaaggcatgaggcatccgaggggcgggaatcatcatggagcagccacaatgcgcggggagcgtcatccaaatcggcccgatccaacgcccggctgaccgcatcgccgaaggaacgcgcgcccttggccgaaacgatgtgaatggtcacatgcttggactgcggcacctccattaccggccccgatggcgagggaatgacctcgaacgaagtggttatcctcgaaccggcgcgcccggtcgcgtcggcgatgatgacgactcccggaagaacattctgcgtcaataccgaacgcaatgtagaccggaggaaacgcatatcctcctcaacggtgatcacagccgtaatgccggtatccacatcctgcctatgcgtatacggtcgagaagacatggcgtcggccaacgcctcatgaatatcgctattacctgtcggactcataaactcccagtgtacgcaccagacttgaagggggtgtgtgtggaactacgcctgctcccggtgctctcgcttatatcgacggcgttcgcgctcgctcatgccgccccaaataccgaatcgctcatcatggtcgatggcccatttcaggcattgttcacgcacttcgcatttggcgcacacacgcttggcatcacgggtcgagcctcccttttccgggaagaacgcctccggatcggtttgcgcgcacaacgccttgtgctgccaagatacatcgccatcaggtcggaatagtccccacaattcatgccatggctcttcggctgaatcgtcgaccacaccccacatgcgattctccttgcctattgagcttttcatacggactaaattacacacatgcaatttcgtttttgtcaaattctttctcgtgtcattacatcatttttatggaactgtgtgctatggcgcggacacgatgccctgatgccgttgcacatgatattgtgccgttcctgcgcaggaacaccatagcgcaggaacacccggcggatgctgtgtcaaagtgtcattcagacaatcgacagtttcaggaggggttatgacgcaggaatcaggtggggcggatccgcatatcaacccgccaagcttcattcctgcgggaaatcgacgcacccgaccttccgggcaggtgccacgctccttcgcccctgcccgcgcctcacgtcagtcaggtcaggctccatcggcccgtccgtccgtcacgggaaatgacatcgaagagcctcaaccgaacgccaacgccacggcaagcgccaacgtcacggacaacggcaggcggactccgcccagtttttctccgaaaaccggacgtgccacccgcagcacggctccggatgccgccgcaccgcgcagcattccgccgtcgcgagcgcggatgtcttccggcttatcccgcaacgccgtgcgcaatccgtcggatatgtcggtttcccggccctcatcgccagcagcaaacgtgtccacgaagttcagccatcttggccggccggcggcggcaacggcgaaaacggtaacggcacaccggccgcgcgccttgcgcatcatcttatgcgcgattgcggtactggtggcggcgttgattctttctgttttcggtgcctggcaatgggtggacagcaaactgaaccggagcgactggctgaccgacacccccaacacgccggcctcgacctggctgattcttggctccgacgagcgagacggttccaccgattacggcggcgtggacaatatctcaggcttcagaaccgatacgattctggtgctgatcaagcctaaaagcgggccgagttcgctgatttccattccccgcgattcgcttatgaacgtcgatgaccagtacatgaaaatcaatgcggtggcgcagattgccggcaagaaagccttggtaagcaacgtcgagcagattaccggccagaaaatcgaccatgtggcgcagatcaagttcggcggtctgcagaacgtggtgaacgccttgggcggtatcgaactgtgctatgacgaggatgttcaggattcctattccggactgaactggaaggcgggatgccatacgacggatggttccactgcattgtccttctctcgtatgcgatacgccgacgcgcgaggagacttcggacgcaacgaacgccagcggcaggtcatctcggccatcgtcaaaaaggcttccagcagtgggaccctgaccaatccgtccaaagtcgtggcagtgtccaatgccgcgatgagcgcactcaccgtggatgaaaaaaccaacccttacacgttgctcaccatggcgttggcgttcaaaagcgccaccggctcgaatggcatctccggcagcgtgtactggtccgacccagattattacgttgatggcgttggctcctcggtgctgctcgatgacgccaggaacaccgaactgttcaatcagcttgccgacggcacgcataaggccggcgccgtgggcaatctggcggaaggctgaccgacgctttcccggagcccatcggcttcatcgtcggcgcatgatcgccgccgttgcccacgcagccaatcatgcacgggcaaaatgtcatgtggataactcggcaagctagaaccacataccttgattcggcttgcgctttcggcatgcgctcccccacgctggaagcatgacatcacagcagaacgattcgaagcgacattccgcccatacggcatccgccgtatcccgggcgaagcaccgtttgggcgcgccgccattgcgcgcccgcctgaccatgcttgccgcggcgtgcccgatgatcgcgcaggcactgatgatggtcatactgctgttgcacgggcaatggctgttcgccgccatgatcacgccaggcatattcgcctgtctcgtgtccctgctgctgacgctccccccacttccgggcccggagaagacccccgccccgcaacaggcaacgatcgatatcggtatcacggacgatgccgatgcccgcgccgcagacctccgtcatgcgccgtcgcagccgatagaatcgctgctgcacttcgcacgcctgccatggcgcaccattgtgggccattggcttgaaccccttgaccttgcggtgccgatcggcatgaccggaagcgagccgctgaggctcgatctgaaccgtcaggggccgcatgctctggtggccggcaccactggttccggcaaatccgtgttgctgcaaagctggtgtctggcgctcgcctcgatgaacgggcctgagcatctgaatttcgtgtttttggatttcaaaggcggttccgcgttccgcaaactcgaacggttgccgcataccgtgggcagcgtatgcgatctggatctggcgcatgccgtacgcgcgttgcgtgcgctggaagccgaactgacacgccgtgaacagctgtccgccgctgtccatgcttccgatatccgtgatatggtcaatccgccaccgcgcctgatcgtggtcattgacgaattccatgccctgaaggaccagctcccggattatgtgaatcgtctggtgcgtattgcctcgctcggcaggtcactgggcatgtatctgatcgcctgtacgcagaatccgatgggtcaggtcagtgccgatatgaaggcgaatatgtccgtcagcatttgtttacgggttcgggaccgtctgcaatcatgcgagctgcttggtgatggtcgtgccgccgacctcagtccggcaatgcccggtgcggcgttctgcaacgattccgaacaggtgacggcattccgctgtgcaacggcgcgcgatatcgatgcggtatgccgccagatcgcgttcgcatcgcggttcgtcgggagcccgccgcagccgtccctgtttaccgcgccacttccccggcacgtaaaagaccggactgtggccaatcacgcaccgcaacgcattcgatttggacttgccgacgatggcatcaacctgcgagaagcgacggtatccctcaccggtggcaatatcggtgtcatcggcccgcaggggcgcggcaaaaccacgttgctgaaaacattggctcgacacgccagcatggctgatggcttggcggtacgtgtcagttccccgcatcgccgggtatgggaatcgcaatggcttcgcaacggccgctgcacgccgtatgccagctcggatgcaccaccacctccgcatatcgtgtggttcgtcgacgacgccgatgagttgttcgacccattccgcaccgacgagcaggcgctgtctttcacacatgcgttggccgatgagtccgtcagcgtggtattcgccgtcagcacgattcgcccgatacgtataccagagcattgcaataccagaatcgtgttcccgtgcggggaacgaacgtctgaccttatggccggagtccccgctcgcctattggatacgatgagtcatatcgatgccgacaacgcgggccgggccgtgctcatcgagggcacatcggcatgtctggtgcagtgcgcttcgtgaaaacttcggttttttctcggcgaaacctcttgaaaatcaccacggttcgtggttaccttggtactggacttaaggaacaacaccagccacggggcttttaagggaggcaagcaatgagcagcgcttttgattggcgagccaaggccgcatgtcgtgacaaggatccggaactcttcttcccggtgggcaacaccggtgcagcctatcagcagattgaggaggccaaggccgtgtgccgcacctgcaaggtgattgatgcatgcctgaagtgcgctctggacaccaatcaggattatggcgtgtggggcggcttgagcgaagatgagcgtcgtgcgctgaagcgccgcgccatgcgcgcccgccgttctcaggccatgcagatgcaaatctgatgttttgattatcgcttcgtcatactaggaaaccctcccacttgggagggtttccttatttttgggcttcgcatcactcatcctgagcggccctgagcttcatatcaagcaccacgcgggtgccgccttcgcggcgcggctcccaatgcacggaaccaccgaaatcattggtcacaaaggtgttgatgatctgcgtgcccaaaccagaaccggaagaacgagccaatcctccctgttcttcggagccgagaccggaaccgtcatcctcgaccaccacattgaggttcgggccggagcggcccacggaaatcgtgatatggccatccttgcggccttcgaacccatgctccaccgaattggtgatgagctcggtcagcacgagggacagcggcgtggcatcctgagcgggcatcatgccgaacttgcccatgtagttgatatcgatgtgctggtctttcatcgtggctaggtccacggccatgcgcagcaggttggcaatcaccttgtcgaagtcgacgacctcgtcggcggtctggctcaatccctcatgcaccatggcaatggtctgcacgcggcgttgcgcctcctgcaattccttcttgacctcatccgacttggtcttacgagcctgaagcctcagcaatgcggagacggcctgcaggttgttcttgacacgatggtgaatctcggaaatcgtagcgtccttggtctgcagctcctgctcacgacggcgcagctcggtgacgtcacggcatagcagaatcgctccgatacgaccgttgttgtcatataagggcagcgagcgtatcgagacggcggaacggttggcgttgagttcggagtcgaccgcggctttgcccgccagcaccaacggcagggtttccggaacggggtcgttctccttcaacagctgtgtgccgagttcgctgaggtaatggccaggcatggtggtcagcaggccgagacgcctaaagcagctgatggcgttcggggctgcgtatcgaaccacgccgtccatggtcaggatgatgaagccgtccgccacgcgagcgatatggcgctggctcatcaccgaatccttgtaggggaactggcctcgcggaatcatctcgtacagctgtttgcccgcgttaatgctttccgactcatatcgaccgttggattctcgtgtggccatattggtctcacgcacgaccaagcccaaggtcttgccattgtgccgaaccggcgcgtacacgttgcagacggtcgccttgcccacggttctcaataccgtggagcggaacaccacactggagagcatggcggcgtccaattcgccgaccatgtcgtccggcatgacgtttcccaccacgtcttccgcccgcagcgtcatcacggtggatggacggcattgctcggccaccacgtatttaccatcgccattctgtaccagcagcagcagatcggcgaagctcaaatcggcgatcacctgccaatcggcgacaagatgatgcagccactcgcggtcctcgtcgtcgaagtcggggcgcgttgcaaggatatgtgaaaaatcagccatatccctatcatacgcagatgcgacgtcgcatcgcccgacggcgaggaagaagcgcggcgtccacatcggcgtccgcatcgttgaccagcatagatgttacgctaacgtaggttacggcagcgtaagaagcgtatcgtcaactcgtgaaacgggggcatcaccatggcatcaacaaccgacgacgcggaaaagacgatgcatcacgacgctcataacagcgcgacgattgcagaggatgccaccatcgcatccaagcgtcaggcggctatcgaggcgcgcgaacaggcgttgcaggccaaggctgatgccgtacgggccaaggcccagttcaaggccgaggccattcgagccaaagccgaggagaaggcccggcacaagctcgccaaagcggagcaccgtgcgctgaaaatcgagggcattgcccctgcggaagtggaacgcaagattcgtctcgacgtgcacggacgaccaaagccgttgatgcgcggctggattcacgcgactgccgctcccctgtcattggcggcaggcatcgtgcttatatgcctggcacatggcgcgagtctgaagtgggcgtgtgccgtgttcatgacagcgtcgctgattctgttcaccaattcggcctgctaccatctgggcgattggagcccgcgcgtcaccgatgtgctgcggcgtatcgatcatgtcaacatcttcctgctcattgctggcacgtataccccggtttcgtttgcgctggaaccgttctggcgcaatgtgatcatcatatcgatgtgggcgtgcacggccatcgccatcgtgattcatgtgatctggatcaatgcaccacgctggctgtatacggtggtgtacatcatcttcggcatctacggcctggcttatatggtgatgttctggaattcgccgtatgcggggccagccgtggtggtgctgctgtgcgccggcggtgcctgctacatcctcggcgccatcgtctacgccttgcgcaagcccgacccttggcctcgcgtcttcggcttccatgagattttccactgcggaacggtggccggatatgcctgccatatggtggccatctacatggtgatcgtctcgctgtggcaataaacgctacgacatataagtatgcccccgcctacgggggcatactagtcacttataactcaggccagcggcttggcggccttgaccgtcacggacagctcgcggccgttcggtgcggtgtaggaaacgacgtcgcccaccttggcaccttcgatggccttgccaatcggggaatccggggtcatgatgtcgtagtcggtgccggccacgatgtcacggctgccgagcacgtaggtcatctcattgccgttgagctcgatggtcaccacagagccctcgcccacggtgccttccggggcattctcgatgatcttggaatcgcgcagcttgacggtgagctcggtgatgcggccctcgttcttgctctgcgcctcacgggcggcctggtagccgccgttctcggacaagtcgccctcggcacgcgccacggcaatcttgtgcgcgatttcctcacgcagctcgccttcacgatgggcgagctcttccttcatcttgttgtatgcttcctgcgtcagcaggtagaccttgtcctcagccatatcgtcctcctgaaccgttgtcgatgctgaaacaattttcgttatttatgacaaaacgccggctatgaccccggcgttcgtcatgtgctgacctatggtcagcgggtggaaatgatgtcgatgacgaacaccagcgtgtcctcgccgccgatgccggcctgcgggatgccgcgggaaccgtagccgtattccggcggaatggaaaccaccagacgcgagcccacgttatgacccggcacggtctggtcccagcccttgatgacctgtcccacgccgatgccgaagctggcgggctgatgacggtcgaagctggagtcgaatggggtgtccttaccccacaccacgccgtggtagttcacggtgacggtgtcgccgcgacgcacgatcgggccgtcgccctcggtcagctccacaaccttgaggcccttcggggcttcgggcgccgggaactcgataacgggcgtggtgccgaattcggcgttcacctgaggcatctgatctgccattagtcctccttcaaagacacaatgcgccctaccttagcaccatcggcgaatcggcggtagtccttcatccctgtgcgatacgacacgctggccgtatacgtcaattccggtcatcatgctggtgaataccagacatgtcaatcagcattcgacgacattgacggcaagcccgcccttggaggtctccttgtatttggccatcatgtcttcaccggtctgcttcatggtttcgatggcctgatcgagggtcacgatgtgtgagccgtcgccgagcatggccatacgcacggcgttgatggcggtgttggcggccatggcgttgcgttcgatgcatggaatctgcaccagtccgcccaccggatcgcaagtcaggcccaagttgtgttcgatgccgatctcagcagcattctccacctgttccggcgtgccgcccatgactgcggcaagtccggccgccgccatcgaacaggccgagccgacttcgccctggcaaccgacttccgcaccggaaattgaggcgttgcgtttgaacaggtatccgatggcaccggcggtcagcagaaacgtgaccacgccctgttcattggcgttgtccacgaaatgccagtaatagtgaagcacggcgggaatgatgccggcggaaccgttggtcggagcggttacgatgcgcccgcctccggcattctcctcagagacggccaaggcgaagagatccacccatgcggcgtcggaagactcgagcacggcgtctttgcgccggctgtcgcggcgcagcacatcggaattcgaagcgagacgccgatacatcttcggcgcgcggcggggtacgtcaaggccaccgggcaatgtgggctccgccgaggtgcatccgtggtccacgcaggcgcgcataacacgccagatggcatcaatatcggatcggacctggatgcctgagcgtgaagcggtttcgttggcccatacaagttcggcgatgctgagatgatgttcccggcacaacgacaccagttcggcgcatgatgagaacgggtagggtgcctcgacgccgaaatcagtggatgatgattcgtccgcgtcggcaaaggaggtgccttccggaggacgttcatgaatgccgatcatcgggtcttcgggagcgcctttgcgcacgaatccgccgccgatggaataccagacctgttcgtcgaccaagcttgcggcggcgtcgaaagcctggaatcgcatgccattggggtgcgcggccatgcgcttccattgttcgaacaccacgtcgcggtcgtagtcgaaatggatgcgtttgaggccggcgaggttcagagtatcgtccaacgcgcaggtctcgcggatgcgcatcatgtggtcggtatccacggtggccggcagattgccttcgagcccggccatcgcagcacgatcggtgccgtggccgagaccggtcagcgccagagaaccgtaaagcgtgattttgacacgtgcggtgcgatcgaccaaatggtcggccagcaacgaggaggcaaaggcatgtgccgcgaccatcgggcctacggtgtgcgaggatgaaggtccgacgccgatggtgaacatgtcaagcacactgaacatttggctccttctcccctgctggttcggcatgccggtgtcaccaggcgtcatgccatcacgatatcgtattccagcctagcgcccggaatctttcgctttgcgcgatgatggccgcgcgcgtcgtgccggcgagcgataagtcagtcagtgagatagtgcggagaacatcataaccagtacgatgataccgatgatggccaatacgatctgcaccaccatcagcccgatggtcagtcccttcttggtggcgattttgggcgcgtacgcctgtgccaacaggaaggcgatgaagccgaacaccgcgtagttgacggtcagggccatcacatcgctgttcgacaacaccacgccgttcagcggctggttcagcgtgttcatcatcgtgctcatcacgaacatgccccacacgccgtagccgattaatccgacgacgccgtacagccatggcttgagtttgtcgttggcacgcagggtcagggcttcggcacaccacaacagggcgaagccgacgatgtaggtgaacgccacggcgatcagtatcacgatagtcgcccacggcaggagtgcggccacattgccgatcatggacagatagaatcccgagcaggcgatggcaccaacggtgagtgcagtgcccgcaatgacggcttgggcaagcatggtgggcagggcgccttgttcgactcgttcgacatcggtccagcgtgaagccatgtggattcctcgtttcatcaggtacatcgtcacaacgccacatagcctaacggccttttgtttcggccttataagctctccacatagtaagctgcgagcccctctgacgaggggagctgtcggcgaagccgactgggggagagaccgcggcacagccgcaaaaaacggcatcggccacaggccgatttcaaggtgcctccggtgggactcgaacccacaagccgaagcgatcgattttaagtcgactgcgtataccatttcgccacggaggccaacttttctattataagctatctcctgccctgagcattgcgtgcgggttgctgcgcttcgtgcagccgtcgcggcatagccgctcccttcgcctacaaacagcccagtgggctgtttgtagcagccggtagcgatagcgtcgccggcgtcgcatataacgcaaacagcccaccgggctgtttgcttaacggctcagcccgctggaggcacttaccacttatgctattgagccagcaaccggcgaccataatcgagcacaatgccgtccagcagcccgtgttcgctggcgacgaacgaatcgatggcttcaccatgatcggccttggcggcttcgctgacacgcgccagcacacggctccagaccacagcgccgccgccgaccacatcgatacggccggggtggatggtcttgtattcgcggcgctcggcgcgcgtcatcctaaggaacttgtcgtccacggcataggcgtcttcaaggctcaaccgatgcccgtcgaccacggtgtgatcgtattctttcaatcccatagccaaggcggtcatcgtggtcaccgtgccggacacaccgatgatggtacgggccttgcctgcgtccacggtgcggaaggcctcatcgatatgctcgtcgatgtccgcaacggcctcatcgatctgcgcctgggtcggcggatcgttggtcagatgacgttcggtcatgcgcacggaaccgatgttcatggagaatgcgccctgaacctgggtggtgggcgcactgacgccgtcgccaccgatgaccagctcggtggacccgccgccgagatcaaccaccagatagggggcgggcagatcgtcacgattgaccacggaagtggcgccgaggaagctcaggccggcttcttcagtgccgggaatgacttcggggcgcacgccgaggatacgttcgatctcatcctcgaattcctcgcggttttccgcgtcacgagtggcggaggtggcaacgaaacgcaggccgtcgatgggatgctcggcaatcacaccggcgaattcccgagcagccgcataggcgcgttccaacgcttcgtcggcaaaacgatgggtcttgtccacatcctgaccaaggcggatcacacgcaggatgcgcggcaccacctcatgcatgccatcggcatcgacacgtgcgatcttcagtcgaatggagttcgtgccgcaatcaatgccggcgacggttacggattccttgctcattgccttctcctcgtatcccttagtgcgtatgaatgg

SEQ ID NO: 3096 - DNA, 93335 bp, Unknown
  R215_18m  MAG No. k141_2245
aagggccgctggcacgtgttctaccagctgcacccgtacggcacccaatggggcccgatgcactggggccatgtctcctccaccgacatgctcaactggaagcgcgagcccatcatgttcgccccgacccttgaagaggagaaggacggcgtgttctccggttccgccgtcatcgacgacaacggcgaccttcgcttctactacaccggccaccgttgggccaacggccacgacaacaccggcggcgactggcaggtgcagatgaccgcgctgccggacaatgacgagctcacctccgccaccaagcagggcatgatcatcgactgcccgaccgacaaggtcgaccatcactaccgcgacccgaaggtctggaagaccggcgacacctggtacatgaccttcggtgtctcctctgaggacaagcgcggccagatgtggctgttctcctccaaggacatggtccgctgggaatacgagcgcgtgctcttccagcacccggatccggatgtgttcatgctcgaatgccccgacttcttccccatcaaagacaaggacggcaacgagaagtgggtcattggcttctccgccatggggtccaagcccagcggcttcatgaaccgcaacgtcaacaacgccggctacatgatcggcacgtgggagccgggcggcgaattcaagccggaaaccgagttccgcctgtgggattgcggccacaactactacgccccacagtccttcaacgtggacggccgtcagatcgtctatggctggatgagcccgttcgtgcagccgattcccatggaggatgacggctggtgtggccagctcaccctgccgcgcgagatcacccttgacgatgacggcgacgtggtcaccgcgccggtcgccgaaatggaaggcctgcgcgaggataccctcgaccatggttcgatcacgctcgatatggatggcgagcaggtcatcgccgatgacgccgaggccgtggaaatcgaaatgaccatcgacttggccgcctccactgccgagcgtgcgggcctgaagattcatgccactaaggacggtgcctacacctacgtggcttatgacgaccagatcggccgcgtggtggtggatcgtcaggccatggccaacggcgatcgcggctaccgcgccgccccactgaccgacaccgaactggcctccggcaagctggacctgcgcgtgttcgtggatcgcggctccgtggaggtctacgtcaacggtggccaccaagtgctgagctcctactcctacgcctccgaaggaccgcgtgccatcaagctcgccgccgagtccggtagtctcaaggtggattccctgaagctccaccacatgaagtccatcggactggagtagctctctcacctccctcacagagggaggttttttgtgtgcccctgtcgttcgccttcgcctatactgatggacggcatataacacaatccatcacacgaccggcaggcgcgcaggctcctcaccttactgttccacgccccggccgcaagcgccaccagcaaaccggactggcgcggaaagcaaggtgacatcccatgtccatcgccaagcgcctcaagcgccgcatgcccaccgtcatcgccgtcatcgtattgctggcagtctgggaaacgtgggtggatctaggacatgtctcccccacgatgatctccgcgccaagcgagattttcgccgccaccatcgaaacgtggaacacgctcggcccggccgcggcgatcaccggctatgagggcgtggtcggcttcctgttcgccgtgttcttcggcattatgatcggcatcgcactgtactgctcgcacacgttcaacgcggcgttctatccgctgcttgccgccgcacaaaccatgccgctgatttccatcgccccgttgttcctgatttggttcggctttgagatttccggcaaaatcgtaatcgtggcggtattcggcctcttccccatcgccgtgcagaccgtgcgcggactagaagcggtgccccagttctattccgacgtcgcattgacctgcggcgcgaccccggtctggacgctctggcacgtgaagctgcgcgttgccgcacgtcagatctatggcggtatccgcgtatctgccgcatacatcttcgccacggcatccaccgctgaatatcttggcgcgcgcaagggcctcggcatctggctgcaggctgcctacaattcgttccgcacgccgctgatcttctccgccaccatcgtcattatcctgatgacatgcgtactgatgctggcggtgaacgccagcgagcgcatcctgctcggcccggccggcgatgacgaagaccccgacgcggaccagtagttctttttaccgtcaaagacacaagccggcggccagaaccgactgaacggggcggcttctcatgaggtctccagccctgtctctataatggaacagctttaccagcgtgtggcaaaccggctttcttgagctttcatagggaatgtcgggggcgctggtcgaacggaaatcaaggccctccatatcgttttctgccgacttccgttcgaagcaatcccagagaacgatagagagacaacgaattagggaaccatcattatgaagaaaagccttgtatccaaggccgctgccctcgtgggcgcccttgctatgactttcggtttcgccgcatgtggtcagaccaacaccgccgactcctccaactccaacacctccgacctcaagaaggtcactttcatgctttcctgggcgcccgataccaaccacatcggcgtgtacgtggccaagaacaagggctacttcaaggacgccggtcttgacgtggatatcgtggccgtggcccaggccggtgccgaacaggccgtgaacaacggtgtggccgacttcgccctgtccaacttgaccaatgtgggcatctacacgctgaagggcgctcacatcaagcaggtgctgcaggtgcagcagaagccgagcgccatttggtgcgcactggcgtccaacaccgccatcaagtcccctaaggatttggatggcaagaccttcgccaccttcggctccaacgagtccgacgccgtggtgcgccgcatgatccagaccgacggcggcaagggcgagttcgacaaggtgaccgtcggcacctccaccttccagaccatggaatccggcaaggccgatttcggcggcttctacgccacgtgggaaggcgtgcaggccgacatgtacggcccgaagctcaactgcttcaccgagcctgactacggcgtgcccggcaacgccgacgccatcggcatcatcaccaatgacaagactatcaagaacaatcccgacctggtcaagaagttcactcaggccactcagaagggttacgagtacgcgtacgccaacccggatgacgccgcgcagattctcgtggacgaagcccctgacgccaacctcaagcccgaattcgtcaagaagagcatgcaggttatcgtcgacggccagtactggggcgatccggccaagatcaaggacggctctttcgtgctcggcaccaacgacttcaagggcactcaggaatacttcgacttcctggctgaagaagacgcctacactgacagtcatgacaaggtgattcatgaggccccgcaggccaaggaccttggcaccgacgaattcctcggcaagtaatttccgatattccgagtttgaatctacgcaaaaatgcgtccttcccatgaggaaaggacgcatttttgcgtatcggccgataaggttattcatagcgaatcatgctaacaaggaggcgattccatggcccaacgtcctgaccgcattattgccagcatggataccggtgttgatgatgcgttggcgttggcgtatttgttggggtcggcggatgagtgcgagctgagcggtgtgatcgccagttatggcaatgtggatgcgaacacggcttatgccaatacttgcgcggtgcttgatttgtttggccgggcggatattccggtgtttttgggctccgagcatccttcttgggctgatgcgtttattcccgatgcagggtgtgcccagtttcatgggaaggatggactggggaatacttggctggcaggggccggggctctggctgatggagctggtgtgcctggtgatgatatgtctggggatgacatgtctgaggatgtgcccgatggggttgtttctgttggcgggtatttggtaggggacgctcatgctcatccggcgtcggggtcttgttctcgtgtgggtcgctctcggcctgtggaccgtccccagtcggctacatcgacagctctcgccagctggggcaaaaggaggcgctccgttgatgctgcggatgggattgagtatctgattgagcaggttcgtgagtttggccgagacgttaccgtgctggctaccgggccgttgacggatgtggatgcggctattactcgggcaccggatattgcaccgaaactcaggctggtgatgatgggcggtacgcttacccaacccggcaattgttgggatgcggtggccgagacgaatatcatccaagaccctgaggccgcgaatcgtgtatttcattccggcgcagacatcacaatggtgggacttgatgtgactcaccagtgtttgctaccgcgatcggcggccgaccagtggcgtgcgacggggaccaagcgcgggcggttcttggctgatctcgcggacttttccatcaaggcaaatttggaagccgaccccgcactgttctctggcggcatgccgttgcatgatccgttggcggcggcggttgcacttgattcttcactggtcgattgttttgatcttgcgttgcgcgcggagaccaataccggtgatttcaatggagtacgaggccggaccaccggagacccggttgggctggtgaatcattccatgccgcatgtgcatgtggcacttggtgcggattcgggacgttttttggatgagtttgcagagaggatggctgaggtgtgccggtaactcccctcagtccgctacacggacagctcgaccgcaattacggacaagctgccgctcgcattcttctggctcgactctcgtctcgccttcgcctacaaacagcccatcgggctgtttgttttacggctcagccccctcaattttgaggggcttaacaaggactatttcacacccccagcaatcaaggaccggcttcgccggactcatcattacctggtcatgtcctatcggcctcggccaggcggcgtgaaataaagaacagtccaccggactgttctttatttcacgccgccaaatcggcgatcgcggtggatgtaatggtcgatggagcgccatagcacgtcacggccgcagtccgggaagagttcgggcacgaagtcgagctcggcgtaggcggcctcccacggcaggaagttggaggtgcgctgttcgccggaagtacggatcaccaagtcgcaatcgggaacgtccggattgtacagatggtcggcaatcatcttttcagtcacacggtcgccggaaatcttgccatcacgcacttcgcgagcgatggcggcgcaggcgtcggcgatttcagcacggccaccatagttgatgcagaacaccacatcgatgaccttgttgttcttggtacgctcctcggcggcctcaagctcgtcgatcaccgacttccacagcttggggcgacggccggaccaacgcacgcgcacaccccactcgtccatctgttccacgcggcggtggatgatttcacgcgagaagcccatgaggaagcgcacttcctggggcgaacgcttccagttttcagtggagaacgtgtacaggctcaaataccgcacaccggcttcgatggcaccggcgatagtgtcgaacaccaccggttcggcggcctgatgaccattggtgcggaccatgccgcgctgcttggcccaacgaccattaccgtccataatcacaccgatatggcggggtaccttgttcttggggaagtcgggaatacgggcagggtcgctgaacggagctgcgggaatgtccaacgacgtgtaatcaacgttctcaaaagccatactcatgaatctatcaagcgcagcgaacgaatcgggcgttcgaggtaatactccccccaatcttcaaccaactcctgcacaacccgctccacaggcgcggcatcaagcaccgaccaatcgccacgaatcagtgcatcgaactggtttaacacgaacggcgcgatacggcgcgcatcggtagtgtggtcggcttcgcacatcacgccgccggacgcgatggacaggtacgccggctccgccttgccgcataccacgcaagtacccaatcgtggcgtccaaccggccaaggccaaggcgcgcatcacataggagtcgcctatggcttgcggggcgtgggattgtttggcgagcgcgttcaacgcgccgatgagcagccgatattggttcgtcagctgctcgtgttcggtgctggcgagtttatcgatggtctcgacgatgacgttggcggcctcatacgccgcataatccgccgcgatcggagcaccgtaagcggcgaccgcttcagcctgggagaccacgtcaagcgagcggccttcagcgataagcacatcgactcgcatgaacggctcgagcctggcaccaaagcgtgatttggtgcgacgcacgcctttggcgaccgcccgaatcttgccatgctcacgcgtcaggatggtgatgatacgatcggcttcgcccagtttggaggtgcgcaacaccacaccttcgtctcggtacagcgacatctcatctcctttccccgcgacgcccggcagactctactcaatgaagtagtcagtaaataaacaggccccagaaggcgaacaccaacagtatgtacagcatggtgaaggccaccagccagaacaggactcggcccagacgggtggaggcgagtaccgggtcggcaccggtgacgatgtctcgaacggattcacgacgagggggtatctgaatcagtccgcgggcggaagcgacctctatcagatgcataaagacgcgggaccaagcccatagcaccagcacggacaccacttggatgaccggccagctccaatacatgacgcccggcgtctcggtaggagcgctgccccatgcaagtttgaccacacccataatcacctgtccaagtccggcaaagaagatgagcagtgtggcaagagtggtgagggtcaaagtcagcagcgcgttgccgaaaccatgtgcgaaaccgagtatcacaggccgttccggtatcagcatgcccgcacgtttggcctcgcgtttctcgcgccgccatcgggcatccgccgcgattttgcggcccagcgccaccagtgccagcacgatggatgcgagcagcagcagtaccaccgtgacgtgcaggatcacaccatatatggtgccgacgcgtcttgccttcaaagcgcccggcagaccgattgattggtacagattggtgccggccaccttttcgctggtctgcgtgagtccggcggaagtgccgacggcccaatcgatgagatcgtccacataggcgtccgcaaacggggtgcccgcttcggactcatcccccaaacgcagcacatggttggcgaccggatagctgcgcacggtcacgttccagttatcggctttgtgggcgttgtagagaatcgcacgcacgccgtcgacctgcgccgtcatcacgtcttttgaaccgtaagccacataggtgggtacggcgtaagcggcgggtttgagcgtggcgaggtcggaattgttcagtccgaacaggccggtgtccgcgctgaacacgcgttggacgatggatcgatagccttcgttcgcgccgacaagagtgaagtcctgggtgacgaaaaatcccagtgattggcgtgggctgaacaccatcgggctcagaagaatctggaaggcgacgtccggatcgtcctcgagcagatatgaggagatccatgtcgattcggaggtggcatagatgccgaccttggcggcgtctacatcgctttgggctcgtaggtattcgatgacctgatcatatgccttggctgaggccggataatcgcggttgatgtcggtggtgctccagacgggtttgtcgagcactgcggtcacaaagccggccgaagccatatcggaggccacatcgccaaaggagttgtcacaggtgccgtatccggcaccgtgcatgaacaccacgccggggcgcttgcctgatgcgttctgaggttcccgaatcaataccttgatggcttggacgccgtccgcattggccttgccccgatcaccaggctccttggtcagattgccgtcgctggtcatgttcagcgtgatgtatcgctcggtgacctcatacgtgcctttcgccggcagcgtttctccggacgggttatcgaaggtgacttcggtatcgtcggtgagcgtggccatcgactggccggtgggttcgatgttccaaggcaccgtggtcaggttggaaatggagaccagcacgccgatcaggataatgaagatgggcaggctgaccatcagccggtgggtgctggtccacggcttggatcgaacagtcaggcgatgctcttcttcttgcgacacgtgcgctattgtaatctgaccgcgatatttacgccgagggcctattcggccgaatcagtgaccgggatgctggattgggaccacgaccgggcctgtggaattgacgggcacttggccgtcggcctccatttgggcggcgatatcgttcgctatggtgagcagcgtgtcgacgatctggtcttcgggcacggtcttgatgaccttgcccttgatgaagatctggcccttgccattgccggaggccacgccgaggtcggcttcgcgtgcctcgcccggaccgttgacgatgcagcccatgacggctacacggatcggcgcggtcacgtccttcaggccttcggtgacggcggatgcgagctggatcacatccacttgggcgcggccgcagctcgggcaggagatgatgtcgaacttgcgggggcgcaatcccatgtattccaggagtttgcaccccaccttgacctcttcgaccggcggcgcggaaagggacacgcgaatcgtgtcgccaatgccctcggccaagagcgcaccgaacgccaggcaggatttgatggtgccttgccaggcggggccggcctcggtaacgccgaggtgcaacggccaatcgcccttggatgcgagcagtcggtacgtttcgaccatggtgatgacgtcatggtgtttgacggagatcttgaaatcgtggaagccgacgtcctcgaacatgtgcgcttccttcaaggcggaggccaccagcgcttccggagtcgggccaccgtatttggcgtagagttccttgtccagcgagccggcgttcacgccgatacgcagcgagatgcccgcgtcggtggcggccttgcagatgtccgggccgacttcgtcgaacttacggatgttgccggggttcacacgcacggccgcgcagccggcgtcgatggcttggaacacgtatttggactggaagtggatatcggcgatgaccggaatcggcgatttgcggcagatttccggcagtgcgtcggcatcgtcctgactcggcacggccacgcgcacgatgtcgcagccggcggcggtcagttcggcgatctgctgcaacgtggcaggtacgttggccgtgagcgtgttggtcatcgactgcacggagatgggcgctcccccgcccaccggcaccgggcccaccatgatgcggcgggacctgcggcgcgggtgcaagggcgattcgctggtcaggtcgaccggatcaccggttttgcggaacggcttttcgatgggattttccgtattcaaggtattcatcattgcttgtttatcaggttgtcggcgcgtcggcgggcttcaagctcaagctggttcatttcctccacgtccgtgaacagcgggttaccacgaagctcggcgtccatctggtccagcacggctttgaccgtgtccacgatgccgaggtacggcagccgatgatcaagaaacgcatgcacggcctgttcattggctgcattgagcaccgccgtatgcttctcggaggcggccaggcagtggcgggccagttgcacggcggggaacgcctcatcgtccaacggctcaaaggtccaagttgcggcttgcgtccagtcgcacgcggcggccacattggtcatgcggtccggcgcggacaggcccagcgcgatgggcagacgcatgtccggcggcgaagcctggcaaatcgtggcgccgtccacaaattcgaccatggaatggacgatggactgcgggtgcacggtcacgtcgatgcgttcaggcgacacattgaacaagcgggacgcctcgatgacttcgaggcccttgttcatcagtgtggaggagttgatggtgacaaccggccccatgttccacgtcggatgatgcagcgcctgctcgggagtgatgttctccatgtcgacacgtttccagccgcggaatgggccgccggaggcggtgaccacaagcttggcgacttcggcgtgggttccggagcgcagggattgccagatggcggaatgctcggaatcgaccgggttgatctggttctcgcgcacttgcgcgctgaacagcagatgaccgcccgcgactacggactccttgttagccaatgccagctgggaaccggccttgagcgccgcgatcgatggttcgaggccgatcgagccggtgatgccgttcaatacgacattcgcaccggatccggccatggcgatgaccgaatccggaccgccggtcacgcggacaccttgtgcgccggcctgtgcgagagccgcttgcagtgctggaaccttggtctcatcaaacaccgcgacttcgggcacatggaactgtgcggcctgttgcgccagcagctcgatatgtgctccgcccgccgccagaccggtgacggtaaatcgttcagggtgacgcgagatgacgtcaagtccttgggtgccgatggatccggtggatccgagaatgatgacggtggagttggaggctatgctcacttttccttcttcgtatcgtcattgttcagtgtggggaacgacaggtcggggatatccgaatcgaagttaccgccaagcgggaacagcagcgggaacgaatcgttggaatcgtgcttatcctgtgacggctgagctgcttccgtgtcgtgggaggcggcaacgtattcagatgattccacagccggacgggagaccgtgctgtctgcaggctgactatcggatacgcgaaccggaatggagttcgtgttacgatccggcttgctggtgggagcaaaggagaccggcatggcagcggacgcagcctcgtcggcagtgctattcacaggttgcgctgccggggcggagggcgccggggatgaaaccgaacccggtacctcattcaatttcagcgcattcggtgtatcaaggctgggcatcttgggagcgaaggacggcgcatccaccgccggaagttcctgagaaaccgcagccatgtgggcgagagcggccagagaggaaccgtcctgcaccatatccacgggctgttccgcgaacaccgacggggtcgatgacggagctgcggattcgtatgacgactgtgccggagcaaacgagggggcgctgccagcggtcacaccggaaaccggtgcggacggggcactggcgggaggctcagccgcaacagctgcggtaggagccacggaaggcgtctcggagacgggcttcgccgcagactcgttggacgtatgcaccgggtatgctgcgggagcaaaggaaaccggctgttccgcattggtgttattggtgcttgtggaagcatcgaacgatgcaggagccggcgcataggcgatcggtgccgccgcggccggcgccgcgggagcaaccggagccggagcagtgaacaagctctgctcggcctgatgcagggcatcgaatgattcgtcatgagcagcggcagacggcgcaaaacgttcgtcagttgccgggcgctgcgttccggaagcgaacaatggcgagacgccgttcgcttgaacggtcacgttcgtggcggtctgggcaggagccgtgggctcgccggacacgaaatcggccacacgtgcataggattccaagcgactcagcaactgcacgcaggcgttcaggaagtaatcgacctgtcgctcgtcatagcctttcttgcccttgcgctgggtgaagatcacattgttgaccgtattcgcattgagatcggccaaagaccgtacatcgtcttcggtcacgccgtcaacgcccaatgcggccgccgccttgtccacaatctggtcgaccagacgatccacctgcttcttatcgtacgaaggctgcttgggcgctccggacttgaagcgttcgcgctcgtcacgctccgcatggttctggacttcgtgatacagcttctcggtcttcgccttccacgtcacacgcccatgctgtgcgatctcccatgtggtctgcttatcgaccacggcacgttccagacgtccaagcgcggcgtcaacctgtgcgatcacatagccgttcttgcgcaaatcaaaggacacgttctgaatgtcatgctgggtgagattcatgccctcgctgtcatacagagcatgggcgcgctccaagaaagcgtccacctgagcggggtcatacccccacttgcgcttgcccgcacgtgcgatgcccgacttgccgtccccttcacgaagttcctgcgccatcggctattcgacctcctgctggatataaacactctgccacaactttacgtgactattgagacgcatctgaccaagaagaccgaaattcacgattttgtagcagtactgccggtttccttctgcgcgcatctcactgagatttcagaaccccttgccgaagactgtcagggaatatcgtcacagcccatgtctgtggaatgaggggattgcacgaagtgatgaaaaatgaaagtgggcaatgagggactcgaacccccgacatccaccgtgtaaaggtggcgctctaaccaactgagctaattgcccgcaaatgacaacaatagcgtatggccggcactgcgcgacacgtggtgtcgcatacgcgtgccgtagcgctcaatcgcgatgacattcagtcacgcccagcagcactacgcagcacgcgacgccagtcaacacgcttaaagtcaagcgtattgattgaggcttatcagcggcccctgccgaatgcgcgcaggcggatgccgttccagtccgagctgacggtcagcggggtggcggcgttcataccggcggtctgtgcggcggactgcacggtggaggagctggcggcacccgggcggccgggcttgggagtcagtatccacagcgggccgtcattgcccagtaccgcgtaggcgtcaacgatcgtatcggacaattcgtcctcatcatcgccgtcgcgccaccatacgatgacgccgtccacagcggagtcgtagtcctcgtccacgagatcctcgcccgtgagctcttcaatctgggcacgaatggaatcgtccacatcgtcgtcccagagccactcctgaacgatatcgccgggctcgaaaccaaattcttcagcgttctgtgatgccgtttgattcacaggggacacattagcaagtcttcgcgaacaaatgcgttaacgcggccgaaaatcgccgcattgtgggcagacccatgcgagtcgtctcaccagaaacaacgactggccgcgcgtgtcatgcctcgcaatgaggcaaatcgtcggcctgccccttgccaatggccaccaacgcctgatacgcctcgtccagcgtggcgaccttgacgtcgcgcagaccatccggcacgcggccggccaaatccgaacaattcgatgcgggagccaggaaccatgtggcgccatcgcgcttggcgccaagcatcttcagctctatgccgccgattctgccgactttgccgtccttgtctatggtgccggtgccggcgatggtcttgccgccgctctcgttggcgggggtgagtttgtcgatgagaccgagcgtgtacatcatgcctgcggacggtccgccgatgctgtccacgtgcatcgtcaccttggcgtgttgcaatgtactggcgtcaatgcccagttcgtccgcatgggctttggcatacgccagaccgacggcactggccgaatcctgggaaccggccatgtcctgttcgactttcttctgatactggtccgcactctggcccaccggtaccgtggcctcacgcggcatgacctccacctgcggattggcccaaccccagacggcctgcgcgttgatgatcgggtacccgggcacgccggacgcgttcaccgtggtcagcagcagcttgccggaatccttatacgtcgtcacgccggtaccggtgatgtcgataaccgcaccatcctcgaccttgcccagcacgtcttgggtgggtccgggcatctcgatgacgtacgggctgggcagcagcagaatcaccacaccaagcaacacggcgaatgcaccgacgaaatggcgtttcggacgagcggccgcataggcccgagcacggctgattccacgagataggcgcgaatcatgcttcacttcgaacgatggcatgcgcccatcccccgcttccgaatccgcagtcgggctcttctgctcctggacgaagtctggttcctgattcctgtggcgtgcaaacataccctacagtgtaagcggagggccgaaatcagccgaaaacgaacataaaccgaaaatattgctcggccacgagcgaacaggcccgggcagaccctacacttggggtaacacaccgcggcaaagaaggatacgcatggacgacaacgcgattcacgagtggctgatcaaatgcttcggccccattcagggcgagatggcctggcagcagatcagccagttgcctgaggagatccgtgaacagctgatgagtcaggaccccagccgactgcccaatccatccgaagtccagcagatgatggccgcgttcagcgccggcggactcaacacgatgggcgatatgcagcgcactgtcgaggaagggccgatcaacgtcaagctcgccaagtcgattgccttgcagcaggccaacgcctccggttccgcgtccagcgtgtccgccgtggatggcgaggcggctcgccgcgcgatgagtgaggcgaacctgtggctggataccgcctgcgagttcaatcccgcgcccggcgatccggatgtgctgacccgcgccggctgggtggaaggcaccatcgaccagtgggcgaagttcgcagctcctgtggccgagtcgatgaacgacgctttggcttcggtgatttcggagcgtcttggcggcgcgttcggcgatggcgagattgccggcatgttcgccggaccggtgccgattccgattcccgacggcatgaaagatccagcccagctgatgaagctgctgggcaacacgtcctttgccatgcagttggggcatgcggccggcaatctgagccatgaagtgcatggcagtttcgatcagggcatcgcattgctgaagaatccggctggtggactgattgcccagaacgccaccgaatacgcgaggatgctgaacggtgagactcctgcgcccgaggccgatacggccggcacttcaaccgactcggtcaatccgttctccacatccaccgacgcttccgccaatcccattggcttcacttcggccggcaacagcgatactccggcaactgacggtaccgcccaagtctccggctccgatgcttccgccgacgccgccgcgttcgaggctgcgctctccggattcgagaccaccgagaaaattcccgaatccgaagtgctttccttcctggccctgcaggaaatggctcacgcccgcctgtatgcctcggtaccgtggctgatgccgcgtttcgaggcgctcatcggcaagtacgcacgcggcatctccatcgatctggatgcgatggaggaacagctgcgtgacgccacgtcgatggatccggagtcgatttccggcgcggtgaatctcaccaaggtcggcatccccgacactcccgaacagcgcgaggcgctggcttcgctggaatcgctgctggcgatggtcgagggctgggtggattgcgtggtgtggcgcgccggtatggcccatctgcctcatatcgaacagttgcgtgagatgatgcgccgcgagcgcgcgatgggtggccccgccgagcgtacgttcgaaagtctgctcggtttgcagctgcgccccaagcgcatgcgcgaggccgccggattgtgggagatgatcaccgccgccgaaggccctgaaggccgtgacgccaagtggtcgcatcccgatctgctgccttcgctgcctagcgacaagcccgcagatggcgcgtctccgtcatccgacgccccttcaggctcctcttccgatgccaacggttccgcctcccaccctgccgcagatggcaagaccggcgatatcgattgggatgccgaactgtccaagcttctcggcgaagacggagaagatggcggcaacggcaactcggaggatacgcaggcatagtcaaccgtccttcagccaattcccgttcctgaacgttcaggaacattcacattcattaccgacgcccgtcacaaaaatcgtgatgggcgtctgtgttgcgctccataaccatccttggtccgcgcatacgacaaatgcagcgaatcctcagctcgggtgatgcccacatacataagccggcgttcctcttccagcgcatcccccgtttccggcgaaccgtacggcaagagtccttccgaacagccgatcagaaacacgtgcttgaattccagacccttggatgcgtgaatcgtggaaatcgtaacgccggaatcgtcgtttgcggcaagtccggtggcgtccaaacccatcgcctccaatagcgcacgtttggacgcggcatcgtcggcgagcgcggatgattgccatcccgaatccttacggacgcggtatttcagtcttgcagcgcgcaaagcggcaccgaataccggctgttgggcgttgatgcgggtgagaatcgcgcaatcggacggcttggctccgttggcgaccaaccgggcgatgcgtgccgccacgccctgcgcctcttccatatcgctctcataagcggttcgggtaacgcgcgggccggattcgcgggcggaaaccagtttcaggtaatcctcacggttcggcgcggccgcaagcacccggttggcgagattcacgacttccggcgtcgaacgatagtcggtgttgagattgacatcggcggcgagcggcccgaattcatcggcgaaacgcagcagatcccagctggaagcaccggcaaacgagtagatggtctgggccggatcgcccacgacgcatacgttgcggttcatcgcgctcttgccgtcaggccctcccccgcccagccacagggtcagcagcctgtgttgcaggggcgagacgtcttgatactcgtcgacggtgagccagccgatggtggaacgaatttgggcggcggcttcgggaaaatcatccatgatatggcatacgagcagcagaatatcgtcaaaatcgatttcgccacgcgaggtcttttcctgctcgtaggcgctgtagacgtcggcgaaccgagcggtgtcaagtccggcgggcggctgccgatgggcgatggcacaggcccgggcataatcttccaccgccaccaacgagattttggcccaattgatttcggcgagcacatcgcgaacggtcagcggatcggcatcggtacgtgcggtggcgcggatgatcgcgcgggagacgacgtcacgctgatcttcgatcacatgcgggaatggagcctcgcatatgtccgcccagacactgttgagctgatgcaatgccgctgagtggaaggtcgcggccgtgactccggcagttcccgcacccgaaccggaacgtccagtacctccccctacgccgagctggcccaaccgtgcgcgcatttccgccgccgcttttaccgaaaaggtgacggcaagcacccgctccggcttccatgccccggtggcgcaggcataggcgatccgccgcgtgaccgtgcgggttttaccggcacctgcgccggcgatgatgcgcaccggcccttgcaacgtagtcgcggcggtacgctgccgctcatcgagcccctcaagaatcccctgcgcctgttccatgcgtccattgtggcacgattcgcgctcacggcacgactcacgcctatggctgaatcgggctcacgacaaaacatcgccagaatcatgcgttttgcgtgtcattctgcggtgcgaatcgccacggatgtattagtgtggaagggtgatgaaacgtagcgattatatgttggcggcactcgcctcagccgtcctgccgaatctgggggtggccggcgtacgcgagaacgtgcaggccagcgcaaccgacgaggccaaaggcatcgatcagaccgtgatccaagatgcctcgggcaagttgtacgacgtatacgccactgacagcaaggaagggcgtacacgtctgatccgccgtgtgaaagcggcgcagacactggcagccgcgcgcgagcttggtggcctcggcttcgatatggaccgtgtggtcgcattcgtcccgggagacgtttcccaacccggccagacggccaccgcacaggccgtggggcagcaggcccaggcggagtccacaccactgaccccgcgcaagcccggtcccacaggcgagacgaccgtgatgatcgccgtccaccgtgatggtcaggcgcggcctctcgacctgttgacattggatgactgcgcggccgtcggcaccgccatcggagccattcatcgcctgccttcgacttttctggccaatgccaaatatccggtagtcaccaccggtcagattcgttcgcagctgaccgcctggattcgccgcttacgctccgccggccatgttccccaagaaatcaccgacagctgggcgcgcatcatggacaccgagggattgtggtcgttctccacctgcacggttcacggcggattctccgacggcgacttcctgttctccggttccaccatcaccacggtgaccaactggcaggatatgcaggtcaacgatccggcacgagaccttgcctggattttcggcaagctcgacgaatcccatcgcaacgccgtgctttccgcatacggccgcatgatgggctctcgacttgacgatctcatcatgctcagggccaacctgtggctgcagatggaacaggtgggcgaattcattcaggcgttgaaccgtgcggacaacaatcgcatcatgcagttcaaggcacaggtcgaacgactcgcacaccagttgggcgtgatcaagcacactccggcaccggccccagccgcagggtcggccgccgcctcgtcgacggagcccggttccccctccacaatcaccgtcggcacattgttgcaggacgaccgtcatcaggaacccgccacgcaggtacccgcacaaccgcagcagtccgaaaccggtaccgcggcggccgaggtctcggacgacacgcccgatccagatcgcaccggttccgctgacatcgtggccgctggcgacgtggatcttaccccggaagtcgaacccgatgctgaccggaccgccaatcacccgcaagcgagtgtctccggcaccgcaaccggtacgggatcgaccaaaccgcagccctcacatggcgcttcccattcttcggtgacgatcacgctgaaggagctcctcagtatgaacgggcatagcggcacgacgtcaaccgacgcttcccctgcatctcaatccgccgccccgaccgacgatgcggtgaatgacgatactccggacagtttcgttcagcacggagcctcgagtgcccaaaccacggtgattccgctgttggagcgggaagaacgcgctctgcgcgatgcccgtgccgggttggacgggtatgacagcgagggcaatccgctggccgaatcatccacatcatccaaataatgtcgtgtgcggtgttccgcgccacgccgagcgcgtaacaccgcacatgacgacgcagacacgcggcacaatagagtacagaacctcggccggcgacggccacttaccatgatgttcgtcacaaagacggcagaacaaggagccttatatggatatcgaactgggcattcagaacgtggcacgaccggtgaacttcagcaccgacgaatcagccgacaatgtgagccaggccatcgcgcaggccgtggccgacaacgcgacgatcgatctgaccgatgacaagggccgtcgcatcatcgtgcccgccaaggcactcggttacgcgatcatcggctccgaaaccaagcacgccgtcggcttcggcacgctgtgaccatgaatcgcgcataagcgtccttgagcattttctcaaggacgcttttctattgccgaatcaccgatatagcggaagcacgccgcgatgaacgatctcttcgacagtggcctcatcggtgaggttctcccccagtttgttcggtttgcctttgccatgccagtcagatccaccggtgaccagcagctggtgccggcggcagatggtgagcagccgttctcgttgctccggtgaattgcctcggtgccatacctccagcccgtccaatccctcgctgatcaacgcttcgatctggtcatcggacagcagtctgcggttacggctcacatcaccggcatgggcgatcagaatcacaccacctgcccctttgacggcggccaccacttcatgagaggtcggcgagggcgtgggaatatagtatttggatgaggcgctgaccgcattcgcaaacgcttccgaacgagtccgatatacgccggcactcaccaaagcatcagcgatgtgaggccgcccaatggtggttttgtcaccctccttgacttgggcgagcacggattgccaggtaatcggataatcacgagacaacaattcgaccatgcgctgcgtgcgttgcaaccgtgcggctcgagtatcggcgaacaagtccgtgatgtgctgattcgtgggatcatactggtagccgagcatgtgtacggagacgttctcatccgtggcggtgatttcggtgccgcggagcaacggcaaaccgaccctatgggatgcggcttcggcctccggccagccggcggtggtgtcatgatcggaaatggccacgcccttgagtcccaatgccttggattgttcggccaatgtggccggcgtttccgtgccatccgagaagacggtatggcaatggatgtcccacccgacggcgggcggctccaaaggcatcacatatccagtcataccttccatcgtaacctcatctcagcattcccacgcaaggcgcagacaggtcgtcaccttctgccaacggccaagaccagacattcggcactcagctgacaaccgcaaaggctaatctggagcgcagcgctatcgaaagggacatgatgactcgtaacaccgcaaccgacacatcatccagcaccacgaacaccacgccgcttggcttggcggaggcgcgaccgttgattggatggcgccacagtgccacttggacatatctcatcatgctgatcgcctcggcagtggcattgggggcctcgctcattctgtccgccgagactttgcagttggctaggcatccggagtccgcgctcggctgcgatctgaactcggtggtgtcctgttcggcggtggcccagtcctggcaggcggaaatcgtgaagttcggcgggctgagctatccgaacgcgttcttcggcatcgccgccgaatcggtgttcattaccatcgcggtgatcggtttggcgcgtgtgaaggtgccgcgttggttcgcgacctgcacgtggctgggcggactggccgctttggcctactcgtactggctgagcacacagtcgctgttcgtgattcacgcgctgtgcccgtggtgcctgaccctgatgttctccaccaccatccagttcatggcgttgagccatgcgaccgtggcagtgcagggattgccgtcacgtaaggctgtggcggctgatgatggcgacagcgaggccgatgtcgcggcggtgccggccggactcaataagtattaccgcctcaacatcgacctcatggtcgacatactgtggatcgtggcgatcgtggtactcatcatcgtcaccgaaggcgcggccctgttcgctgcctgattcctttacaacaaatcgatatcggcgaccagcgtggctgctccggtcagtttcacgtcgctgtcggtgacgtccacgcgcagggtaccgccacgtacggtgatgtcccagtggctgatgccggtcttggcccgcagcacaacgcctgtggcgcataggccggtgccgcaggacagggtttcgccgcagccacgttcgttgacgcgcatcgtggcttcacccacgccggtgttctgatcgatgtcgtcgacccgcacgaattccacattctggtcggattcgatggtcgggctcaccacgggcttgatgaccagatccagcgcctcgaccaccggcagggacgcgaaggcatcctcgatcaccgcgaccacgtgcgggttgcccatatccacgaacgtgccgcgcgccgagccctcagcgccggggatggtgacctcgtaggcgtcggtttcgccgatcttccactcccccatttcgacctggaacacgttggctccgtacggcctcatattgccgcgtggcgtcagaatcttgacgccggcacgggtgccgaggcggaacggctcggtggagtcggccacaccctcgcgctgagcgaacaaggtgatggcgcgcgtaccgttgccgcacatctccgccaacgatccatccgcgttacgatagtccatgaaccatttcgcgcccccggccagtacgtccgaaagctgatcatcgcttaaatcagacacgaaatcaggccgtgtcaggcgaatcaggccgtcaccgccaatgccgaagtgacggtcgcacaggaatcggacctcatcggcggtgggctcgaatttgccggacttgtcgaggtacaccacgaaatcattgccggttgcgtgtgtcttggttactcgttgcggaagactcatggctttcagagtactctagggagcgaaacaacaccgcaaaacaatcggctttgtgatcggtcgcggcaacatacggttgcaggcatggctatagggaggattcaggcatgagctcttcggctccaatcggcgtattcgattcgggtcttggcggtatttccgtggctcgccaaatcgccaaggatatgccggccgagcgtgtgctgtattttggcgattcggccaacgccccgtacggcgtcaagacgcctgagcaggtgagggccctgagtttcgatattgtcgaacggttcgtgcgtcaaggcgtcaaggccgtggtcatcgcatgcaacaccgccacttccgccgcggtgaacgatttgcgcgaacactacgatattccgatcatcggcatggagccggccctgaaagtggcgtgcgaccgtggtgacgtgccttccgacccgcatcatattccccagagggtgattgtggcggccactcccctgactttgcgtgagcggaagttcgccaagctgatggatcgattcgattccaacaacacgattttcaaggagccttgccccgacttggtggagattgtggaatccgggcggctcggcgaccatgacctggtgatgcgcacgctgcacggctacttcgaccagtacgacatggagcacatcgactcggtggtgctgggctgcacgcatttcgtgttttaccgcgactacttccgcgagctgctgcccgaacgggctgctgtcatcgacggcaacgaaggaaccgtacgccacctgggcgtggtgttggagtccctgggcaaactggcacccgaagacgcgaccggcggcgtggaactcgccaattccgatctgtccgaacgtgttacacggctttcacgcgacctgctgaatgcgtgatcggatgcatgatgatgaataggaggctgatatggcactgaagacggcaatgattgatgtcggcggcgggttccgcgcgattttcggctgcggcgttatggaccgcatgctggaggacggcatcgacgtggacatgtgctatggcgtgtccgccggggcggccaatatgacctcgttcatcgcccgccaacatggacgcaaccacaccttctacaccaaatacgccttccgcaaggagtatgcgagcgcggaaagctatttcaagaaccgcaacttcgccaatctcgactatatctatggcacgctgagcaatcacgatggtgagaatccggtggatttcgcggcgttcgaggccaatccgaccggattcaccgtggtggcctgcaatgccgaagacggctcgaccaagtatttcgacaagtcacgcgtccgcttcgatgatttcgacatcatcaaggcttcgtccgccgtgccggtggcctgcgagccgtatgtggtggatggcgtgccgtatttcgatggcggcatcgccgatccgatcccggtacagaaggcgctggatgacggctatgatcgcgtgattctgattctgtcccgcttgcgtgacgaagtgcgcaagcagcagaaggatctggctccggcccgcatcctcgaacgctcccaccccgccgcggccgagaagctgcgtatgcgctacaagacctacaacgacgaactcgaactcgccaagcattacgaggcggaaggcaaagtgctgatcctcgcacccgaagacctgtatggtctcaacaccctgaagaagaacttcgagggcctggaaatgatgtatcgcaagggctatgcggcggctgaagccatcccggcgttcctcgggaagtgacggcaccggcgaagtacccgttcacgccaaaccgtatagccgttccgcgttggcatgcgcgatggcgtcgataacccgtttcgcctgattcgcgttccatgcgccatccgatacccagtcgatggcgattcgcgcaatatacctgcggaacagcaccgcggccagataatgcaattcactgatgccgacgccgtccgacgcatagagcaacttgtcaaatgcgcaccacgccagaacattgcgcagcacttccctcacctgcgctcccatatgcgtattggcaaggctgacatccatgtatacgttggcatgcaccgagcagagaaacgccgcttcacgctcgtatggcacgcaatgcagaagcggaagtgtcaaggtgcaggcgcagatcgccggacacgttgaatttctcgttttcggcgaacgagttgtccgcgccgaacaccacccagaccagggcggcgcccaatccgttgcgttcgaaggcttcacgcctgcgggcgggaacggatttggcacgggtcacgccggcatagtccacataggtgccggtgacgatgtccacgggcttgcgttctgcggaaacggtgttgggaatgaagttggacatggcgatttcctttactggtaagaagacaatgaatggattgttagtaagttatcgatatgagtagctgaggcggaatgcggatggacgacaagcccgattcaggcgaaatactcctgaaggttctcgctggcacccagcttcttgcggaagaagccggtgcgaatcgcaatgatgatcaggccgacgaccaacctctttctgtgtttccccaaaccatcgggggaggaacgttgtggttcactgtagtacccgcgaccggctgatggggccgtgtccttatttgaaaatcatcgcttttgatataaggcgtgccatctcccgcatatccgacgcgacccgcgttatgatcactcgcgcgagcctcgtcggacgaatctgtcggccggccactgagtttttaacaatcaaccggatatgccatcgagctcattcgaggctgtcgtgtgcgagccgggcgaaggtgccgttgcggtcgaccagttgacggtaggtgccggtttcattgacgtggccgtggtcgaggacgataatccggtccatgccggttagcacgcggggccggtggctgatgacgatcacagtggtgcccgccggacggttggcgatcagatcatggtagattgcggcctcggcggtggcgtcgaccgcggcggtcggctcgtcgagtatccacaacggcttgccggacaggaacgtgcgggccagcgcaagccgctgccattgcccgccggacaggccaacgccgccccactcctgaccgagctgcgtatccaagccgccgggaagcccatccacgatgtcgagcgcgcgggcgcgacgcaacccgtcacataactcatcgtccgattgccgcagagcgggatcgatgaactcgcgcacggtcacctcgatgtgcgtgaaatcctggaacaccatgctcgacgcgcccaaccgttcggcccacgaccccaaggtacgaccgttcccgccgtccgcgcccgagggcagggtcacggtgccgtccggggcgtcgaggatgccggcgatgagcttgacgagcgtggtcttgcctgacccgttctcgcccaccagtgcgacgatcgatcccgcttcgacatccaacgacacgtcgtccaacgccggagtctgaacggccggaaccgacgctgccgacgcgtcatccgcgtcatcgtcatgctttgcaacagtcggatacgcgtacgtcagatgctccacgtgcacgccgaccggaccggtcgtttcggggatcgcggggttcgcgcgcagcaggcccatgagccgttcgtaggcaagaatcatcggcgtggacgccatgaggttgccgaacgcctcgccagtggtgcgcgtgaccgacaatcccgtcatgatgcccaccaacgcggccgggatgctcgacacggacgcatggccggacgtcaggatcagccagaacgcgccgcccgtcagcacggcgaacacgagcgaactcacaccggtcaactgcaccgtgcgccacgagatacgctcccacatgccggccatattgaaatagcgcacgcgcgcctgcgcagggatgccgaacgaaccggccgtggccgcgatctccgtgctcgacggtggataatccaacaaccgctcgaaatagttcgcccgacgcgactccctgccgcgcttgggccataactcgttcgtgagcttctccacgccgaactgggccaacagctccgggaccatcgccaacgcgatcatcagcgccgccaacggatgcatatgccacaaggacgcggccagcatgaccatcgacgccagcgcgcccaccactgaggtcgcgtccgcggcctgcgaagccacgttgtacgggatcgcgtcgcgcgcggcccgcacctgcgtcgtcacctcgtcgtccaacgtctgcgcgggagtcagacgcgccagcgcgtcggtcagatcggactggtattcggccatcaatggctcctgcaacaagtcacgcatgttctgcgccaacgacgacgacaccgacatcaacaccgcgcccaccgtcagcaccgccaggatcactgcgaaccggcccacgcccagccccgaccccataccaagcccgtccgggccgcacgcccaaccgatcagccacacctgcaacgacggcatcgccatcatcaccaacatcgacagccacatcaccaccgtacgcaccggacgcctacgcaacgcatacgcactcgtccgccacgacgtcgccaccgcatcacaaaacggccgaaatcccgcgacaatcggcatttacaacgcctccccacaatagcgagacacagatgcaatgatagaccgcccgagttctaaatagaagcgcaacacctgtctatggctgaaagtgttcaagttcataaccagagagaaagtgtcgcgctcgatatgagagtgtattcccacctgtcggcagaggaacgtgtccggatcgacgagctgaggacacagccgatcggcgaacgtccgaaacgcgtgggcccgcgccgcaagttcggccattatgagtccgacacggccgtcggtgcctccccgtcgaggcggtgcggcgacacgcaggtcgaacgcaagagccgccgtctgttcgccgggttcatccccgacaagagcgcgctgtccaccgcgcgcgccgaatacgacatctacaaggacatccccgcgcccgcgcgcatcgaccggacctgggacaacggcacggaatcctcctgccacctgctcgtggacgagtcgctcggcatgctcacctactatgcggacccgtactcgtcctatcagaggggcaacaacgagaaccgcaacgggcgcatccgccgctacctgcccaagagaaccagcttcgacgacctgacggacgcggacctgcaggccatcgtcgacgagatcaacgacacccccatgaaggtcctggactgggaaacacccaacgaggtttgataccgcgaactcggcaagctaatgtcgaagacaagctacccaaagacgaacgttgcacttacaaattgaattcgggaagctcactcatgtttaatgtaatatttagaattacattaaacatatcgcatgcatcgcattattcgagaaacactgtactctcggcaaagacaccaccctacacaccgcaactttccaatgacgcctcatgaccagctcggaaccggtccgacaacagaatcgttgagcacctccttatcgaccgccatcacaaatatcgcctgcatcgcaccaccaaggcaccgatcactcattaaccagcatcgtgagcatatacatcggcaaatatgtgacgccttcctcttggaacacgttggtttccgcgaacaccatcgccttgtcaatggtgtagccatcagcgctcaacgcattgtcaagcgccgcatgagaacggtaatatctgcccgacttaatctccagggccaaaacatcaccatcatcggtctctatcaggaaatccagttcgccaattccttttttcgtaaagtaatacagattggtgaatccatgcgcggtaagttcctgagccacgacattctcatagactccccccatgttcatcgcagcctgaccatccagtatgcccagtgctgacttttttccatacgagctggtcagcaatccaacatcggaatagaacagttttagcaatcgacgttctttgctggctctcagcggggccacgggggcggcaacattaaatacgggcagcgcaacattagcacgggtaagccaaaggaattcatcttcaatctgcgagaatcgtttgacttcggcaatagaactgacttggaatctgcgattttgactttgcagttcactagggataagtcgatacatttcttgaatgaccagtctcttatccttcggcgcatactgcttaatgtcatgctcatagtatgcgcgaatattggtctgaatcgcacgcactggatcgatgaccttgctctcaacaaacgaagtcactgcagccggcataccaccgactaacagataccggtggaacaaatccgtcaaacgctgatggacaaaatcaggaacgggttttacggcaccgtaactgtcacgaacaatgtcgaagacggtttccgacagccccagtgcccaacagaattcttcaaaatccagtggatacatgataaattcatccaagtatccgacaggcagggagcgcacatcctccagttctacgcccaataatgagccggaaagaatatagtcatagtctccccggtccaccagtcctttgataaaagtgacaatctgtggacatgcttgaatttcatcaatgaagataagcgtcttccctacaaccaacggcccttgtgcagcaacagaaatacgcagcatcaaatcatcgggactggtggcttgcgcaaacgaacgacgcacgctgtcgtcaagcaataggttgaactcagccatatgctcatactcgctctgcccaaattcctcaaccagatacgtcttcccaacctgccgtgcaccagtaatgagcaatgcttggttggtcttatgctctttccagaaagcaatacgctgatatgccttgcgtttcaacatgtttcaccccttcgtttcacactcgtctgattttgtaatatcctgtattttacacttatcaagttctataaatgccatattatcgcattcgtcacaatctataagtagatgattctcacactcgtcatgatctgcatacggcccatttgcgcacttgtcggaatcagcgcggaacgcagtgaagcccctcgcttggaggggcttcactatcgatggatgaggatttgcaaacggggtgattacttcgtctcggccgcggtgagcatggccttggtgacctgctcgtagagatcctgataaccgccgggcgtggaagcgggcagcaccacggtcttggtgttgttcgattcgctcagcgagcgcatcacgtcaagatactggttgaacagcaccacgttgttcacgtcgttgatgtccatgcccacggcctgcaggctcttgatctggtcgacgatgccattggcgatctcacggcggtagttggcctggccttcaccctgcagtcgggtcttctcggcttcggcggcggcctgggtctcgatctggatgcgttgggcttcggcacgctggcgggtggcttccttctcgcgctgggcggcgttgatggagtccatcgcgttcttcacctgcgggctcggatcgatggcggtgatcagcgtcttgaccacggtgaagccgaaacggctcatctcggcgccgacggttttctgcacatcgaacgccacatcgtccttgcgggcaaaggcatcgtccaaggtcagggccggaatggcggaacgcagcgcgtcctccatgtagctcctcagctgaccggccgggtcgcgcagctcgtagtaggcggtggccacgtcgttcgggttcacgcggaactgggtggaggccacgacggtcacgaacacgttgtcaagagtcttggtctccagctgcacgttgagctggttgacgcgcatgttggtcttcatggcgatgcggtcgacgaacgggatacggatgtgaatgccggcgaactgaaccttcaggaacttgccgaagcgttcgatgatgtacgcctgctgctgcggaacgatgaacaatgcggtgcccagcagcacgataagaacgactaatagaattagcaccaacagcatggttccgcccaacatacttgcgatggtcatataaaactcctctcacaagggtcaagcacggcatatcgttgtgccgcgccccaacaccatccatgctaccatcgcacgcccgggaactgatagctctcacaggcaagtccaagaaagcgaacgtcagatttcatgttccgttcactccggcagccacatcttgtgcactaatgtttgaatcagccaagtcgcacgtcagaaacaacaaagtcgggcatttcaaccaaggaaacacccgacttgaatcaagcactgccgccatataaacacatcagaagtgttcgttgagcttcttctcgcagtaatcctgaagccatccaagcaacgtgcagaagagcaagtagatcaagcccacttcaatgtataggaccagcggctcgtagtaaatcgccacaatgcgctgggccgtcatgaacatttccaccacggtgatgttcgccgcgagagacgtgtccttgaccaatgcgatgaaggagttgaacaatgcagggaaggcggagcggaatgcttgcggcagaataatgcggcgcataatcgtcacatacggcatgttcgccgccaagccagcttcaagctgtcccttaggcacggcaagaatcgcaccacgcaatgtttcggcggcataggcgcccacattcagcgagaacgcgattaccgcggaaggcaatgccggaatcgtaatgccaacggacggcaatccaaagaagataacgaacaactgcaccagcaacggcgtaccacgaaacacccaaatgtagaaccacgcgatttgggaggccacaggtactttagccacacgcaccagcgccaccacaatcgccagtatcaaaccgagagcgaaggaaatcagcgtcagcggaatggtcacagtgataccgggaatcagtagcttagcaaaggaatctacgactattccccatactcgtgcgtccattggtcatcctttgttgtgtggtatatgttgcgtctgctcgtaatcttcacgaggccagctcatattttccggctcccctaattacaggagagccgggaaacatgtcactcctgagagaagtcctcgccaaagtacttttcggagatcttggtcaatgtgccatccttctgcagcttgacaatggctttgttgacttccttgaccaagtcatcgctgcccttgcggaacggcaggtaggcggccggagtcttctcggacttggcggcaatcttgatgtccgcatccggcttctgcttcaggtagtcgagcgcagcaaggccatcgttcaatgacacatctgcacgaccggacgtgatggcatcgacctgctgaccgaaatcgttaacctgaacgatagtagcgcccttctcctgagcggtcttgttccagttggaggtaccggtttcagcggcgcgaagccccttgacgtcatcgaacgaagtgacgttcttcgggttctccttggaggtaatgacgacaccgtaggagtaggtgtatggttcggagaaatcatacttggccttgcgctcgtcggtggcggaaatctgatcggcaaccgtatcgtacttcttggcatccacaccggcaagcagggagtcgaagctgccctcggcaaactcggccttgataccgacctccttggcaatggccttggccacctcgacatcgtaaccggtcagctcattggttttggagtcatggtaactgaacggagcataggtgccctcagtggcgaacacgattttgccggcctgcttgacctgctccaatgcactggagttggaagcggaagccgaaccgcatgcggcaaccgaaaccagcacggcgacaccggacagcaaagccgcagccttgcgaatcacttgattattgaacatgacaaacccctctcttgatattgtcacaattaattacaacagccgtgaaacgcctctaccgagtcaccggaatcatcagcacattgttggttgaagacaggaactcgacggtacgctcctcctgcggatgttcgaagatccgcttcggatcaccctgctcgaccacatggcctccttcgatgaacaccacatgattcgatgcctcataggcgaaccgcatctcatgggtgaccatcagcatggtcatgccttcgctaccgagttgcttgatgacccccagcaccccgttgaccatttccggatccaatgccgaagtgggctcgtcaagcaccaacagctcaggattcatagccacggcgcgggcgatgctcacacgctgctgttgcccgccggacagtgtgctcggataccgatcatgaaaatcggcaagtcccacacgatcgagttgctcaatagcgatcttgcgggcttcatcaggcttgattcccttggaatacaccaacggttcggtcacattctgcaatgccgtcttgttcaaaaacaggttgtagttctgaaacacgaacccgattttcgaacgcaccttgtgaatgtcggcagatttggtagtggtcaaatccacaagaccatcaccgaaatcgacggtaccggaatccgcgtgctcaaggaaatccagaatgcgcaacagtgtggatttaccggagcctgaggggccgatgacagtaaccacattttgtcgaggaatgtcaagatcaagcccatccagcacggtggtgtcggcaaagctcttgctcactcccctaatccgaatcatcccgatactcccttttcgctgctgttatgcacgtcaacgctcgttcgcgaagcacaatcccttaccgtagacgcgcttgctcacctgtgtttcggcgtggttatatccagtgcctatggagtgctattcacaccaatgaataacacatcggacgccgacgtattgttcgctcacagatgcagcagatcgtcaaactcgtacaactcttgtctttacttgatattcagctcgttgagcttgttcttgatatccacagccgacggttcgacctggaaagtgccatcaggatagagcaccacgggaatgtgctgctggccgctgatggccaccgcacgatcggccgccccatcctcggtttcgatgtcatgccacgtatattcggtgccaagctcctcaagcgtgttcttcgcctgcttgcaatcaccgcaccatgttgcgccatagacgtcaatagccatgtcctgttccttctttcgtaatacaacaacccaaattcacaacgccccaagaataacagcgcaggtttttctcagaacgaacaattatccgcatacgtaagcgatacacgtcagtatgcgttggcaatggcttggtcaaggtccgcaatcaaatcatcgacgttttccaatccgatggaaagtctgatgagattatcgctgactccggcggcgatgcgcgcatccaaaggaacctcgcgatgcgtgatgcgcgcaggatcgacaatcagcgaacgcgcgtctccgatgttcggcacataggagaatactgtggcgccgtcgatgattcggtgcacattatcggcgctgccatccaccaggaacgacaggatttgaccgacaccgcgagggaaatacttgcctacaagctcgtattgcggtgtatatcccaatcctgaatagttgaccttcatcacatgcgctgcacgattcaaatgctctgcgatccgttgcgcggaggcaacctgctggctgacgcgctgaggcaatgtttccaaaccaatcaaggaaagatacgcattgaacgggctggccaccgcgccgaacgtgcgcagatatttgatgcggatgcgcttgatgaatgcctcgttgccgtatctttcggcaaaactgtgccattcaccgttgcgatcatcgctgatgacctgctgccgtgtggtgaattgggggaatctgccattcgcccagtcaagatgaccgccatcgataaccgcgccgccaatcgcattgccatggccggtaatacctttggtggtggaatgcacgacgatatccgcaccgaactcgataggccgcaacagatacggcgtgggcacggtgttgtctacgatcagggcgatgccgtgttcatgcgccagctgtgacagcggctcaatatcaaggatttccgtagaaggattggccacggtctccgcgaagatcgctcgcgtatccgggcctatcttcgattccacttcagccaagtcgttgatgtgctttacgaaatcggtatggatgccgaattgtggaagaaaatcaccgagtgcatccacgcttgctccgtacaagttgctgggagcgatgattctgccgccgccttcgcccacgcacatcagcgcataactgacggccgccatacctgagccgaccgccaccgcaccgataccgccctccaatgccgcaagacgcttttcgagcacatcaaccgtggggttggccacacgtgagtattcgaatccgtcgatgagtccgcctgcgagcgcatcaccacgctgcgcattctccaaatcgaatgcggcggaggcgtagatgggcggcaccgccgcatggccatagtccgcggggtcataccccgcatgaattgcccgcgtggcaaactcacctgttccggacgtgatactcataggtgtttccagcccccaattcatgtcggtaatagtcttcgatggagcgtgttgcgagcggtcaggcaaacgcttcttccgttaattgcgcgaacacatcgcagtcggcgtgacgtttgaggtattgttcgtaggcgatgtcgaacgcctggccaagatcctcaatcaggtcggcggcatcctcaatacccaaggaaaggcgcacaagctcgtcggtgatgcccaccttgaggcgttcttcgcgaggcagctcgaaatgggtcatgcggcagggcagctcggccagtgattcgacagcgccaagggagaccgccaatcggaagatgtgcaggttgttgagcacatccgcagggtccacgccaggcactacttcaaagctcagcacgccgccggcgcccttcagtcccttggcggcgagtcgctggtcaccggcccccggcaggcccgggtaatgaacggacttgaccagcggatgcgcgagcaggtaccgcgcgatggcattcgcattctcctgctgccggtccatgcgcagggccaatgtctggatgccgcggcgcaccgaatcgcattcagtgggcgccagtacccctccaagacggttctgggcgaagtacacgcgattggccaaatcctcaccggagacgaccacgagaccggcgttgacgtcggagtgaccggccaggtacttggtggcggagtggattaccacatccgcgccaagggaaagcggctgctgcaggtacggggtcacgaacgtgttgtccacgatggacagcgcaccgtaacggcgggctgttgcggagatggcgcgtacgtcgttgaccttgagcagcggattggtcagggtttcaaagtagacggcttgcgcaggcgcgatgccgttcgcgcggtcgcccttgacggcggcatccaacgctgcaatgtcctgggtattgactgactcgaccacgacgccccaacgggtaaagaactcattgagctgcgaatacgacccaccgtaaatgttgtcccctacaataatacggtcgccgggcttgaaaatgctgagcacggcatgaatcgccgccaagccggaggcgaacgcaaaaccgcgcgttccctgctcaagctgggcgatctgctgttccaggaagtcacgtgtgggattgccgctgcgcgcatagtcgtagcggggcatcgcgtcgaccttctcgaaggcatatgtcgttgagttgtagatcggcgggttcacggctccggtgttgttgtctccaaccggcagtccgtggacgagctgagtattgaacctggtcattgcgcaccccctttatggtgttctctatggctgctgtgcacgaggccgttccccgtgcggcacgtctacgacgataacgtatcggacacttgaatggaacggcgttgctatatgggttgcttatggaccgttcaaatgcggtcgcggcggtcacgtggctacactgggagccatgaagattgccaaggccttgacccgtttgaccggtcctgaaaccgccccggtgttcgtgctgctgcacggctggggatccaatgaatacgatctgcccgatctgctgaactattgcggtgccggttcggctgattatgccagtttgcaggcacccatcgcctatggcatgggatatacatggttcggtgcgtgggcgcatgaaggtgtgccggagggcgaatcattggacaagcaggcggctgaggccgcccaagccattgatgcatgggtcacggagcatattcccgccactcggccggtggttgccatgggattctcgcagggcggcctcttggccgcgcatctgctgcgtttcaatccgaagcgatatgccgcagccgtctcctgctctggatggctggcaccggggtccgttgcgggcgatgccgaattggcttcgttgaagccgcccgtgttctacgggcatggtgctgcggacgacatcttcccgaaagccgatgtggcggcgatgggtgagttctggcgcgagcacggcacgttgaccgaacaggtgtatccgggcatggcccattcgatcaatatgccggaaatgcgcgatattcaacggttcttggaggccaacggattcattcggccgcagatttggtagtcaccacctcacatggcgtagtctacgtgggcgaattcggggactttgtaccatttgacggggtagccggcaccgtgggcgcagaagaccgagtcgggggtgttgtccagatcggcttcgggatcgtaggcggcggctgcgatgacctgttcggcgtcatggcatggcttgtagccgccgaaggtggcggagaaacggccatggccgtgcgtgtactggttcacgtccatcgcatagtcgcgcatttcggacaccggtgcctcgccttcgatcacggcgtattcgtcatcggtgaccggggattcgaagctgccggccatgcgctggatgtcgctcatggcacggccgatcatgtctgcgggcacttcgagccggaaccggtaccacggttccagcagtcggcagttgccctcccctgtggtgtccggccggctctcgaccggcgtctcgggccggccactgactcctgccctggcttccatcagcccttggcgaatcgcccggtacgtggcttgacggaagtcgccgccttcggtgtgcttcagatgcgcgcggccggccaccaaagtcatcttgatatcggtgagcggtgcgccaacgagcacaccgagatgctcacgctcggtcaggtgggtcagaatcagccgttgccaattgcggtccaaatcattttcggacagggccgaggccacagcgactccgctgcccggctcccctggttccagcaggatatgtgcttcggcataatgacggagcggctcgaaatgacctgcgccttcgatcggcgcagtgatggtctcacggtacaggatggagccggggccaaaggacacatccagaccgaaccggtcgtgcagggtctgctggatgatttccagctggacagcgcccatcaattgcacatgaatctcggccagccgttccacccacaccacatgcaacaacgggtcttcgtcttccagctcacgcaatgcggtgatgaccttatgcaaggtcagatcatcgaactggggacgggccggcaagctattgtccgccgcggtctggccggcggtgtcgttctcctcattgcggccggttcccgacttggcggcatcatgctcggcatcgtcctgattcgcgctgtcatggccggctcccccacgtttggccgctcccgaggtgccggccgtatcggattccgctccgacgggcaacaccgtgtaggtcaacacgggttgcaacgacggcgattcggcgtccggttccgttcccagcccttcgccggggaaggtctgcgtcagcccggtcaccgcgcataccaagccggccggcacttcggtgaccgtctcgaatttggcgccattgtagatgcgcacctgatcgactttctcggaccacgccatgtcatcatcctcctgcgctggcgacggtgtcgacgccgcggcgcacgaggatgaggagacgatctccttggctttgagcgcaccgccggtgacgcgcagccacgtcatacggttgtgctgaccgtcgtgggcgattttgaacacgcgtgcggcgaaggcggccggccattcacgttcgcgggtgaacgtctccagcccgtccaggaattccttgaccccttcgagtttcaatgccgagccgaaatatacggggaacagctcgcgtacggcgatcatcgatcgcaatctgcccacggacagcgcgccatgttccaaatagtcgttcatcgcctcctcgtccagggtggcgatgtcttcggcgaacgcgtccaacggtagcgcgctgccctcagtggactgttccattgccggcaacggatatatcgcatcgctcagacgcctgcgcaactgagccaacacggcctcgcgggcaaatccggcggcgtcgcacttgttgacgaagatgaacgtcggcacaccgtatctggccagcagacgccatagtgtctcggtatggccttgcacgccatccgtgccggagaccacaagaatcgcgtagtcaagcacacgcagcacacgttcggtttcggctgcgaagtccacgtgccccggcgtatccagcaaggtcaggcgcaggtcgccgtgttctaccaatgcctggtgcgcgaaaatcgtgatgcctcgcgccttctccaaggaattggtgtccagaaacgcatcgccgtgatccactcgccccaatttgcggatctcaccggtacggtagagcagcgcctcggacagcgtggtcttgcccgcgtccacatgcgccacgatgcctgccactatctgtttcatcagctgtgctcccttcccgatgcgccgcatgttgccggccgcctaaccaatatatccgagaaaatccgggagggaaaaattttaccgtcagaccgggctgccggtacaataagtcaccgaacaccgactgatatgaggagcctccgtgaccacttccggcattaccgttttcggccaaccatcccagcccaatcatggtgccggcgggcgaatcgccatggacgatgccctctttcccaccgattatgtggcgctggatctggagaccaccggcttttacccgaacagttgcgccatcacggaaatcggtgccgtgcgcgtgcgggaggggcatatcgtcgatcaattccagcagctggtgaatcccttgcggccgattccgcgtcagatcaccacgctgaccggcatcaccgatgcgatggtggccgacctcgatccgattgacgaggtgcttccccgattcatcgcatggctcgctaccccggctgccggtcccaccgttgagccgattgtcggtcataacgtcagcttcgatctgcgattcctggattacaacacccggcatatcgccggctgcggctttgcctgcgcggattatgacacgatgcagatcagccgcgccctgttccccgcgcagcggcatcaccgtctggctgacctgatcgtgcgcttcggcatcgcggacaatgaggaacaccgcgcattaagcgatgccatccagacccagcagtgcttcgaatggatgcggcattatgtcaccgagcatcacgaatccgaagcaatccgttggaagcaggcgccggccagaaacagcaccgaaattctccaccagcagctagtggtaaagcggtagttacagcccgtattattcgcacatagaggaaaactattagtcgctgggctagagaccttatagtggacggattcctctcgcatatcggagaaatgcgggataccacacggttagcggccaatttggggccggcgtcccgcaaccgtgcgggacgccacgcacgtcaaacgatgcacacggctggcatcccacaccccattccacagaaccattggaattctgccaatcccacaaaccggtgacgacaccgtacatcaggttctgtgggacgccagaggaaaaacacccgaaatccgctggcatcccacaccatgtcacaccgcacctgcagcatcgcaccacaccacatcacgccgacacctattcgtgccccccccatttgcataattcgacgtttttggaagatggcgcacacatgcatgtgcccccatttgcatatcaaacggttgacgcacaaatggggacacacaaccacaactcagaatcctcggaattccgccaatcctgagatttcattccccaacacggcaatcgccgcctctgccaccattttcgcatcaaacgattgacgcaacaatggtggcgcatgcccctttgtatcggtatgaatcagtccctgccgtcaggctctccccctattgtgagggccgactggcagggactgaacacgcataatcacatgagcacgccatgccaagcatggacatctcagtacgaacagaacctattcgcacacgttacagcccgtattccttggcgatgacggaccagaggtcggcggcggcctgatcgacggtttcgttgacgatggtgacgtcgaattcgctttcggcggcgagctccactttggcggtttccaagcgtcgggcctgctgttcggcggtttcggtgccgcggccgatcagacggcgcttgagctcttcgaagctcggcggcgcgatgaacacgtacaccacttccaagtcgagttcggcggcgcgctgcttgacgcggcgagcaccctgcaaatcgatttccagaatcgttggcatgccggcagccagatgctcctcaacaggcttgagcaatgtaccgtagtgggccatgccgtgcaccacggcggtttccaggaactcccccgccgcttcgcgggtcaggaactcgtcttcggtgaggaaccagtagttgacgccatcaacctcgccggggcgcggggcacgcgtggtggcggagacggacacccacacttcggggtggtcggcgcgcagcttggcttccacggtgcccttacctactgcggtagggccagtcaggacgattagacggccggcatgggtgttttcagtcatgggttcctccggagatgatgtggtgtgcagcgattatgaatccaatgtggtaacggctcaccggcgagatgaccggtaactgttacagccccgacgaacagggaagaatatgaatcgtgatgcgacgtatgcaatgagatagatacgtacgcatgccgcgacatctgattccgttctgattactggttttctgcgccttcggcagtggcttccatcagcgactgacgtacgtcaagcgcaatcgactcggtagcttggctcagtgcggcgatatccggcccatgcgaggcgataaagcgggacacggtaaccagcacgttgccgcgcgtaccgcggaacacggttttcagatccttggcctcggcaccctgccaaccgtaaccgggggaaagaatcggaccggtgaacttggaggggtccacgccggaatcctgcatccattggccgatggtggcaccgatgatcagacccaccgagcccatgccttcgatatccacgttatgcttctgcgcggtggaggcgatgccgtaggccacggtacgtcccttgtaatcgccgctctggcgcaacgcggtctgcagactcatgccttccggattggaagtcagagaggcgatgaacacgccgcgtccgttttccaacgcttcggtaatcaagccgttcaacgagcgcgcgccatagtacggcagcagcgtgatggcgtcggccagcaacggtgcaccgggcttgaaataggcgtctgcgatggcggaaatcgtggtggacaggccgccgtgcaggcagtccacgatggtgatgacgcccatttgtcgtgccgcgtagagcacgcgctcgagcgcttcgaaacctttggctccgtagcgctcgaacatcgacgtctgaaatttgactgctgcggcgcgcccgttggcggcctgcagcatacgcatggagaagagttcggcaccttcggcgtcgacgttgtatccccagtcggtgaggagcttgcgatgtgggtcaatgcccacacacagcggtccgtatttggccattgaattgctcagtcgcagaccgaaatccgaacgttgtgcctgcaattcctcactgctgggtgtagtcatcagaactcccgtcgctccaattcgaacagctgcttcgaatgctcctgaatgctcatgatctgataatcattatgcttcacggcctcgatagccagcagtgcggcttggaactcggtgatggtggtaaactgcggcagatcggctgcaatagcggcagcacggatggagtagccgtcggaacgggagccgcgcgagttcggcgtgttgaggatcatgtcgatcttgccttcctcaatgagctgaaccacgttcttgcccacggagccggcggcgtgatgcacctcgaccggggcttccggatcggtgtccacgcgggtgctgatcttgtccacgatgttcgactcgatgccgtaacggcgaagcacggaggcggtgccctcggtggcccagagcttgaatccaagctcttcgaggcgcacggcgagcagcggcagctgacgcttgtcggtgtcgttcacggaaatgaacacgttgccgtgggtcggcaggccaccatcgtaggcggcgagctggctcttggcgaaggcgtgcgggaagtcgcggtcgaagcccatgacctcgccggtggagcgcatctcaggtccgagcaggatgtcgacggtcttgcccaccggggtgcggaagcgcttgaacggcagcacggattccttgaccgcgacctgctggccggggtggatgtcgccgccgtcgcccttgggcagcagcagaccgttggcgcgctggtcggcgatggtctcgccggccatgatgcgggcggcggccttggccagcgccacgccggtggccttggaggcgaacggcacggtacgggaggcgcgcgggttggcttcgatcacgtacagcgtgttggccatgaaggcgtactgcacgttgatcaggccctgcacatggcagcccttggcgatggcgtaggtgccttcgcgcaggcggcggatctggtcgtctgacagggtggacgggggcagggtgcaggcggcgtcaccggagtggacgccggcctcctcgacgtgctccataatgccgccgatgtacagttcctcgccgtcgaacagtgcgtcgacgtcgatttcgatggcgtcctgcaggaacttgtcgatgagcagcggggagggcaggcggccggagaccacggtatcggccttggcctcggcaagcgcgcggtccacgtacttggtgagctgcttgtcgtcgtagacgatttccatgccgcggccgccaagcacgtagctcgggcgcacgagcaccgggtatccgatgcggtgggcagcgtccatggcctcttcgaggctcagggcggtgccgtaacgcggggcgttcatctccgccttcttgagcacctcgccgaacagctcgcggttctcggccagatcgatggattccggggtggtgccgagaatcggcacgccggcggccttcagacgcgcggccaaggacagcggggtctggccgccgagctggacgatgacgcccttgaccgggcccatcctcttctcggcctcgtagatttcgagcacatcctcgaaggtgagcggctcgaagtagaggcggtcggacatgtcgtaatcggtggagacggtctccgggttgcagttgaccatgatggtgtcatagtccttgccaagctcctgcacggcgtgcacgcacgtgtagtcgaactcgatgccctggccgatgcgattcgggccggagccgaggatgatcacggcctcgcgctcgcgcgggcgcagctcggtttcgtcggcgtagcagctgtagtagtacggcgtggcggcgtcgaactcggcggcgcaggtgtcgacggtcttgtagaccgggcgcaggccgtaggtccagcgcagctcgcggatggtgttctcgccttcatcgcccaagccacgcaggtgggccacctgcacgtcggacagaccggcgagcttggccttcttgagcagcttcggggtgagggtttcggcctcgcgcaccgtcatggcggtctcgttgatgaggaagatctgcttcaggaaccacgggtcgatcttggtggccgcgaacacctgctccagcgtggcgccgccccagatggcgcgcatgagctgcaggtaacggtgttcggtcggggtgtggatggcctcaagcagttcggccacttcctcggcggacggcttctcgccatcccagttgaagcccatgtggcgcttgtcgatggaacgcatggccttgccgagggactcctggaagttgccggccagggccatggcctcgcccacggacttcatggaggtggtcagggtggggtcggcgcccgggaacttctcgaaggcgaagcgcggcaccttggtgaccacatagtcgatggtcggctcgaatgaggctggcgtggactgggtgatgtcgttgcgaatctcgtcgagcgtgtagccgagggccagcttggtggcgatcttggcgatcgggaagccggtggccttggaggccagtgcggaggaacgggagacgcgcgggttcatctcgatgacgatgatgcggccggtcttcggatgaacggcgaactggatgttgcagccgccggtgtccacgcccacgccgcggatgatggcgatgccgatgtcacgcagcttctggtattcgcggtcggtcagggtgaagcagggggccacggtgatggagtcaccggtgtgcacgccgaccgggtcgacgttctcgatcgggcagacgaccacgacgttgtcgttgcggtcgcgcatgagctcgagctcgaattccttccagccctcgatgccctcttcgatcaggacttcgtcggtgggcgagtaatggatgccggcgccggcgatgcggtgcagctcctcctcgttgtgggcgatgccggagcccaggccgcccatggtgaagctcgggcgcacaaccagcgggtagccgaacttctcggcgatcttgtcgacttcctcgatgctgtgggcgatgtcggagcgggcggattcggcgccggcctcgtcgacgaccttcttgaacagctcacggtcctcgccacggtcgatggcttccagggaggcaccgatcagttcgacgtcgtacttcttcaggacgccggcctcgcccagcgccatggcggcgttgagtgcggtctggccgcccagggtgggcagaagcgcgtcggggcgttccttggcgatgatctgctcgaggatcggagtggcgatcggctcgatgtaggtggcgtcggccatctccgggtcggtcatgatggtggccgggttggagttgacgaggatgacgcggatgccttcctcacgaaggacgcggcatgcctgggtgcccgagtaatcgaactccgcagcctgaccgatcacgatcgggccggagccgatgaccatcacggatttgatgtcggtgcgcttcggcatatcacttaccttccttggagttgttcttcataagttcgcagaaacggtcgaacaggtaggccgcatcatgcgggcctgctgcggcctccgggtggtactgcacggagaatgcggggatgtccacgcactgcaggccttcgaccacgtcgtcgttcaaatcgatgtgggagacgaacaccttgccgtacttgccgttctcaaacggcgcgtcgacctgcttgccgatcggggcgtcgaccgcgaagccgtggttgtgggcggtgacctcgaccttgccggtggtcagatccttgaccggctggttgatgccgcggtggccgaacttgagcttgtaggtgccgaagccgagcgcgcggccgagcagctggttgccgaagcagatgccgaagaacgggtagccggcgtcgagcacctggcgcagcagctcgatttcggggccggcctgttccgggtcgcccgggccgttggagaagaagacgccgtccgggttcaggttctcgatttcggcgaaggggatggtggagggcaccacgtgcacgcggcagccgcgctcggccatgcggtgcggggtcatgcccttgatgccgaggtccacggcggccacggtgtacagcggctccttgccttcgtactcgccgcatggctcgatggtgtaggcctgcttggtggacacttcgtcgtacaggctcaggccctgcatctgcggtgtgttcttgacgtcttcgagcagctgctcgatggtcttgagcgcgccggtggcctggtcggtcagggcgtcgccggagaagatgccggcgcgcatcacgcctgcggaacgcaggtgacgcaccagcttgcgggtgtcgatgtggctcaggccgacgatgccgttcttggcgaggtcgtcatcaaggctgccttcggcacgccagttgctcacgttcggagagggatcacgcacaatgtatccggcaacccagatgcgggaggactcagggtcttcgctgttgacgccggtatcgccgatgtgcgggaacgtctgcacaacgatctggcgatcgtagctcggatcggtgagcgtctcctggtatccggtcataccggtggcgaagacgatctcaccggtcgtctcaccgagggcgccgtacggctcccccacatatacctgtccgtcttccaaaacgaggactgcatcgtccttgtcatacatcggaattgcgatggtcccggactcgttctggctcaccaaaacccccttatgtttttcgggtattcgtaccaaggttaacggccagcgcagactcacacgccgttgggcgcaaagtctcaccccgctggcggggctgtcggcaaggtgccgacttgagaatgtgtggcgacacaagtgtccgcccatgaaaaagcctcccgaatggggaggctgaacaacaaatgactaatcgaccgtcggctgaatctcagcggacggggcagcgggctcgtcggatgcaccggacgaatcgggcgaatcggaaacatcgccctcatcggtcggctcggatgcggcggcatcggaatcggacgattcctcatcggcctcttccgtcacggactccggtgccggtgctgcgttcttggcggtgcacaccgcagacagcaggccatggatgaaagcgggcgaatcgtcatcgcacagggtcttggccaatgccagagcctcgtcgatggcgaccttgtccggcacatcatcgttgaacagaatctcccaagcggcgatacgcagaatgttgcgatcgaccacgcccatacggcggaccttccaacccgtggagtgttcgtccagggtcatgtcgatctgacgacggtgctcggccacgcccttgacgatttcaatggcatagtcgggaagcggggtctgggcaccgggatgtgcgatgcgttcgtcaagcagggagagaatatcctgacttttttcgtcggcttcgtacagggtgttcagagcccttttgcgcgcggtggaacgtgccatactgctgctgtcctagtcctttatacggtcggtcgtctgttgaggatgcggagatcagttgttctcgcggccggtgtaggaaccatcctcggtgttgatcttgacgcggtcgccctcattgatgaacagcgggacctgaatctcggctccggtctcaacggtggccggcttggtgccggcgttggagcggttgccctgcaggcccggctcggtgtgggtgatggtcaggaccacggagcccggcaggtcaacgctcagcggggtgccgtcgtggaaggagaccaggcagtcagtgccttcgagcatgaacttggccttgtcgcccacgagggtcttcgggaccatgatctggtcgtaggtggtcatgtccatgaacacgaagttgtcgccgtcctcgtaggagtactggagggtgcggttgtcgacggtctcgaattccatcttcatgcctgcgttgaaggtcttgtcgacgatcttgccggagagcacgttcttgatggtggtgcgtacgaaggcggggcccttgcccggcttgacgtgctggaacttcatgacggtccacagctggccgtccaggttcaggacggatccgttcttgatgtcgttagtagtctgtgccacgtttttcacctatttcaaattcaaactagcttaggcaaagcccaaaaattgccttggctattatgccacaccgggtatacaggaagtgaacgctggggtttcccacgtggcccccgactagactggatgaatatgcgatccttcttcgaagccatatccgtatcctgcgtcgtccccgcgcaatcgccggcagacgacgaacgcacggtgttcgacaacctgtccttcagcatggaacgcggcgacatcatcgatctggtgggtccgtccggctccggcaaatcgagtctgctgaccgcatgcgcccgactcaacccgcacgcgcacggcacgttcgtcctcgacggcgtgggcagcgacgaattcagcgcgcagcagtggcggcgggacgtctcctatctgccgcaaaaaccgatcctgaccggcaaggacgtggccgaggcgatccgcctgccctggacgctcgcgattcgcggcaagggcggcaaggccgagcagctgctgcccgacgagcgcatccgcacgacgttggacgcgatgggctgcgaggacatcgacctggcgcgcgccccgcacgacctgtcgggcggtcaggcggcgcgcgtggcgttggcccgcacgctgcttaccgacccgaaggtgctgctggccgatgaggtggatgccggactcgacgacgacaacgcgtccaaagtggccgcgatcatggcggacgcggccgcacacggcatggcgatcatccgcatccgacaccgtccgccggacggacgcgccacccgcacgctgatgctcgatgcgggacggctcaccgatctgacgcgggataaggaggtgcgcccatgaacggcgcctacgacatcgacacctggggtcttgttctggcgttgggcatggtggccgtggcggccatcgtcagcgaactcatgcacatgggcatcggcaggaccctgatgtggtcggcatgccgcgccctcgtgcagctgtgcgccatgggattcatcatcagctacgtgattcgttcgaacagcgtgtggatggtgttcgctctgatgacggtcatgctggtcgcggcggtgcagatcgtgatatcccgcgcgcgcggcatccccaaaggtcttgccggaccgatcttcctgagcctggtcatcacgatgctgctcatgctggcgttggtcaccgaactcatcgtgcgcccacacccgtggtatgcgccccagctggtggtgcccctgaccggcatgctgctaggcaacaccgtttccgcgctcgctgtcgggctgagccgattctatgaaagcatggaggaacgccgcgacgaggtggatatgatgctggccttgggggcgacggcatgggagtccgcccgcccatccatcatctcgtcgattcggctgggactgttgcccaccaccgcttcgctggcctccagcggcatcgtgaccatcccgggcatgatggcgggccaggtgatagccggcggagatccgctgaacgccgccaaataccagttcgtggtcttcggcgccatcgccgcgctgaccttgctggccgacggtctgatcatggccatggtctatcgcacctgcttcactaccgacgaccaatatcagacgcctaaagcacgatagcctcagtatcgatctcaggccaagcctcaggcgatggtgaccggcgtgccttccggaatttggttgtagaaccattcggcatcggccacagtgagtcgcacgcaaccatgtgaggccggctgaccgagcttgttgccttcctcttccatatactcgccggagttcgccccggtcggcaccgagtggaagaggaacgggccgttgaatcgcacccaataatcagcacccatgccttctgcgggattgtagaagtgatcgcctctcatcccgataacatagttgccgcgcggggtcgtatcgttgagcccggtgctggcgatcatcgtgtagatggtctcaccgccggattgcacatacacttcctgcttggcgatactgactttcacgctgagatcggagtattgcgacaaatcaggctgcttgccggtgggattcgtccatcgcgcacgttgcgcttccttgtcacgctgctcctgaatcgcctggttaaagaccggtacctgctggcggtccaaggatgaggccgatgcagacactcgcgatgccgactgttgcgcggattgactcaccttctgcgcctgcccctgaacctctgcctgcccctgtgcgaccgactcaccgcggggccacacccgttgggcgtcaatcgtcgagaagacggcaagaacgcagcacaacaatgcgcataccgcaaccacaatgcgccgtacaacgtaaattcgttgacgacgaatcctcatccgtgctcgacgccgctcagtcatgtcttccttctcgttgcaaagactttttccgtaagcattgtagccgcttttacgatacgtcgcgtaccaatatcacgcgcgctattccgctgtcactattcctattccgttgccgtccacttacgtctcagcaacatccacaggccgatgatcacggccaccacgccgagcccgatgccgaacagtcccgaggattgcgccgcgtgcgcggttccctgggattccaacagcacgtcctgcgtgaccaccagcgacagcatcgcatcgagaaggtcacgaatttgaccgacgaatcgatggggttgtgcgtcttatgcgaaatcaccataccgcgaatcgcaatcaagaagaacccgcaacttacgcagcagacggtcaatcgccttaaggaggcgttctggaagctgtatgaaaccaagccgatcgagaagatctcggtgcgtcagatcaccgaactcgccggctacaatcacgccacgttctacctgtatttctcgtccgtgcgcgacgtgcgtgaccagatcgaagacgacctcatcgcccagcgagacctcatattgaagcagtgcatgcatgacggcacactccccagcatcgcaccgcatatgcaaatgccatcgcaatcggaagcagcgcagcagccagcggcatcaccgcaagcccagtagcgaggtcaacccacagctggcggcgcgggaaacaggtcgcgccgcccagtacacgaatccggcgagcttctaccgagtcgcgaggaagaagaaacgcgggaaaggggaagatgatgctgccgtccaactgtgtggggtattcctcgcggacttgggagaacacttcggcctcgaacttcttgcggccggcgtcgtcaagcgcctgcagatacggacgcatgccggtgccgcgataccagtccataatcgcctcatgcgagggcagcgtgtgctcccgtttgaatcgcagatactgttccgaatcccgggtaaccatgctccccacgctaatcagccgttcacatatcggccgatattatctcacaattcagccaagcagggcgtcgcggcgggcgatgagcccgtcaatcgcggcctcgccttcgatgacggtgaaggtcagggacttacgttcgctggtctgcggggcgatggtgtgcaggtcgccgcgctgctcgtgccagccgcggccgtggacgctggagttcgagggttcgaggccgaccacgtagtcgcccgcacccatcgacttccattccatgaagtatgggaagaggctggcgtcgaagtcgatgacgactccaagtccgagcttgcggttgaccacggcggcgaagctgcggccgttctcgtcggcggcgagctcgtgcaggtacacgctttcggggcggttcgcctcgggtgcttggatttcgttccacggcgtggtgtcggctgcggtggtctcgtcacgcggggtggccttgcggctggggatcacgacttcggcgccttcggcgagcaacggccagccgaagttgcagtggtacatccacatcagcggctcgtcgcggaaggattcgttggtcacctcatcctcgaccgtgatcgacggctggccgtacacgctggtgatcttgcggcgcatcaccagattctcgccgaacagttcggcctcgcgcatttcgccggagacctcgagcacgtagtcgccttcggcggtccagtgggcgtcggagcccacatgctcggccggcgtggtgcggatgcggccgtgcatcgggaagctgccggccgggtacttgccgccctcaggcgtgacgtacggcgcgcagatgttctcgaagccgcaggtgaagaacaggccgcccatgatggagcgctgcgcctccagcccgttggtgtcgaactggttgcggccgttcaggcccggcttggacaggaaggtgaggttctcgccgcggtattcgaactggcagacgtcgagggcgcggtcggccatggatacgaagcgtagcgggccgttcttcacctcgatggccttgaggccgtgggcacggccctcctggtactcgatcgggcgcacgtaggcggcctgctgaaggctgcccatgtgggccaacatgtcggctcgcgtattgtgttctgtggatgtcatcgtcgtcaccgctccttgcaatcatcggcttgttgtccgtgtgcacatcatactgtaagcgttttccgcaattgtcgctatcaacaacgtatacgcatgtcgaaaagttggaccgaagaacaacgcaagcacaacgaaggctccccgaagggagccttccatcatagcacacgttacgcgagaattcgtcgctcgcgctttacgcttccgcggcatcgtccttcagcgcacgcagcagggccttgttgcgggtttcgatgatgcgcttgccgtcctcgccctgccaagagaagaagccctgaccggtcttggcaccgaggttgccttccttgaccttttcggcgagcagcgggctcgggccggtgccgttgtccatgtcgtcgaacaggtaggtgctgatgttgtagaacacgtcgagtccgccgaggtcgatgctggcgatcgggccgaccaggttccagcggcggccgaggctgtacttcatcacgtcgtccacggtggccgcgtccgctatgccctgctggacgatgtagaacgcctcgcgcaacacggccagctgcaggcggttgcccacaaagcccagcgattccttcttgatctttgccggcttcttgccgatcttggccatgaggtcgaaggtgatgtccaccaccttcggatcggtcttttcacccggcaccacttcgaccagcggcatcaactgcgcggggttccagaagtgcgccaccacgaagcgctcggggtgccccatcaccgactgcagcgcggtggggctcaggccggaggtgttcgtggacagaatcgcgtccttgggggcggcgtgctccacttcggcccagacggacttcttgacgtcaaggttctcggccacggattcgatgacgaagtccacgtccgccacgccgctcgcatagtcggcgtaaccggtgatgcgggccagcaccgtgtccacggtgtcgccggccttgagcagtccggcttcggcgaagtcctcggcatcagaacggatcgccttcatcgccttctccagcgaggcctcgctgcggccgaccagatgcaccggatatccggccagcgcgaactgcaacgtgatcgcatggcccattgttcccgtgccgacgttcgcaatcgtcttgatatcgtccgctgtctcaatcatggagatcccttctttccggcggttcgcctggcgttggcgtacgcaggaacagcaccgtgccgttatgcgtttgctcgcattctatgccgatttcgctacgtgaacatttactgaacatttcgcggattcgactagcacaaatccctatatcagcacaaaagcgtggtgccgcaacaccgaagtgttacagcaccacatgcaccacgcacgtcacgcacagcacgcgtcacagcatcacgctgccatccggaacgtcgacgatatcgccagacgcgcccaaacgtgcacggaacggacggccatcggagctcgcgacctcgatgccagccggcgtacggcgcgcggtgaaggttacggcggaaccgtcgatttccgtaataacggcttcggcggtctccacatcatccacgaacacggagaccagcgcgttctcaccgtacacgcggtctggcttggtttcgccggggttggtgacgatgacgctgccatcgcgcgcccacagcggaatcgaatcgtagccgtgggtttccttgcgccaaccaccctgcgccttctcgccggtcagccagttggtccacacgccgtccggcagatagtaggaaacctcaccggagtaggtgaacacgggggcgaccagcatggacggaccgaacatgtactggcggtccagcgtgcggcatgccgggtcatcggggaactccacgaacatggaacgcatgaccggggtgccgttcacatgaggctgcaggccaagctggtagacatacggcatgagttcaagcttgagcttggtgaactcgcgcaccacatccacggcggtctggccgggcaccaatgcgacgccgttcttctcgtcttcctcgtcgaacagccacggcacacggtacacggtggaaccgtgcagtcgcgagtgggagccgagcatgccgaacgccacccaacgcttgtagacggccggatccgggaacgcaccttcgaagccaccgatgtcgtggctccagaagccgaagccggaggaggtcagcgacaggccggcacgcaaggactgggccatgccgttgaaggtggactcgcagtcaccgccccaatgcacgggctgctgctggccgccgacggtggcggagcgcgcatacagacaggcgttgcccttgccgtaggtttcttcgatggcttcgaacacggcctggttgtacagctgggtgtaccagttgtgcatggagagcttcggagagccgtcataccagacgacgtcgcgcgggatgcgctcgccgaaatcggtcttgatggcgtccacgccctgattcagtaggaccttgaccttgtccttgaaccattcacaggcggccgggttggtgaagtccaccaagcccatgccggcctgccagaagtcggtctgccagacttcgccattgggcttgcgcaccagatagcccttgtctcggccttccttgaacatttcgccgcgttggccgatgtacgggttgatccaagcgcagatgtgcaggcccttgtcttcgtgcaggcgcttcagcgtggattcgatgtcgccgaagaaacgtttgtcccactcgaaatcgcaccagtggaactcgcgcatccagtagcagtcgtagtggaaggcggccagtggaatatcacgctcggccataccgtcgatgaaggagttgatggtggcctcgtcgtatttggtggtgaacgaggtggtcagccacagaccgtagctccatgcgggcacattcgccgggcgtccgacgagcttggtgtagcggtcgagaatctgcttgggggtggggccatagatcacgcagaagtcgatggcctcgccgggcacggagaactgcacggcctcggtgttctcggaaccgatctcaaaggagacgtggccgcggttgttgaccagtacgccatacccattggaggtcatgtagaacgggatgtccttgtagccctgttcggaagcggtgccgccgtcctcattccagatgtcgacgctctggccgttcttgacgtacgcgccgaagcgttcgcccaggccatatacgtcttcgccgaccgacagatgcagctggatggcggtgaacacgtcggactcgtcatgggcggagccgtccatgctcacaccgaattcgccgaccggctgggcggtgacgttcgccccggcaccaagattgaaccgggccagcgacttgcctgctgactcggtgagcaccttgccgtccccatcaaggaaggcaaggttccaaggcgcgcccttgacgaccttcgccgtgagcccgccggtggtcagcgtgacgtccgcgccattgacgccgacttcgccgtcgccattgccgtcagccctgacagtcacgtaatcccggctgccgggcttgtcggcgttgagcgggaatccggggtattcggtggcaccctgccagtgttcggcacgcacacgaatcacgccttccgcaggtgtggtgatgtccacattgaatgtgggcaggttcagggtatcgtatcggccgcgcaccacggaggtcggggcgaggacgttgaggctttcggtggtggcatccgccgccagttcgtaggcttcacgagcgtagagggcgtcgacgccgtcacgaatcatccagtagccgttggtgaacttcattgttgctgctccttggtggagaggtggtttcgacccccagggaacaaggcggccgaaaccaaaatcaatatgtactgcttgttgattgaattgcctgttgtgcgaatgaccttacttcaccgcgccggtggtgatgccgttcgacagcgtcctctggaagaggaggaagaagatcaaggtcggcacgatactgatcagcgaggcggaggccgtggtcgtcacatccatcagacggtcgccggacagcgaggcgatggcgatcgggacggtctgcgaggagttgtcgatcaggaaggccatcggaatcatgtagtcgttccaagtccagatgaagaagaacaccagcatgacggccagggtcggcttcgaaatcgggaagacgatatccttgagaatcttccagcggcttgcgccatcgatggtggccgcttccagaatcgccttcgggaaggtgccgtacaccgacgacaacaggtatgtgccgaatgcgctttggatcacggtgaagatgatgacgatggaccacgggttgttgtacaggccgatttccttgaacatgatgtacagcgggtacaggagggcttcctgcggcagcatgttcgcgagcatgatcaacagaatgatccagcgacggcccttgactcggccgatgccgagggcgaaggagttgaacacggacagcaccacggcaaagattgccaccaggccggaggtccagatcgagttccacaccttttcggggaagttgacgcgggtccagaacttgatgaagccatcaagcgtgaacgaggcaggccaggacagcgggccgttggcgttgtagtcggccgaagtcttgaaggcgttcaggcaaagaacgacgaacgggaacagcatcaccaagccgccgataatcagcagtacgatgatcagccagtcgccggcggtgcggttcttcttgactttggcgattttcttcaattcagctgcgctcatagtgctcattttttcaatcactctccgtcctcagcttcgaccttctgctgaaggttggtgaacacgatggccacgataatgatgacgactgtcagagcggtcgcaatcgcggcgccgtagccgacctgctgtacctggaagaactgggtgtaggagtagtaggacggcacgatggtggtagtgccggggccacccttggtcagcatgtacaccggggcgaacaccttcagtgccgcgatggtgcaggtgagggccaccacgaagatctccggcttgatggacggcagggtgatggccctgaagcgctgccaccagttggcgccgtcgaggctggcggcctcgtacagttccggatcgacgcgctgcaggccggacatgaagatgaccaacggatagccgacctgaatccagaccatgatgagcatcaggaagatcagggccgtatccggtttgccaagccagtcatgttgcaggcttccaaggcctatggcactgagcaatgagttcagagcaccgttctcagctcggaaaatccaacccatgaccagggagccgatggcgataggcagcagctgcgggaagtagtagacggcgcgcatcgtggacgcggccttggggctgaacttcttctgcacaacgtcgaagatcagcgaggagaggatcagaccgagcagaatcgggatcaccaccatggcgatgatcatccagatcgagttgcggaaggaaatccagaaggtatcgtccttcatcagtcggacccagttcttgaggccggcccagaccggcggcctaatgccgcgatagttagtgaaactcagatagatgttccagatgcccggaacgatgatgatccaggtgagcattgccacaccgggaatcaggtacaaccagaaacgattcgaagggctgcccgggatgcgcgacattgcggtttcttccgggtgcttggctttattggtctttgttttcatcagacacttctaaacgtagagcatgcaagattgttgggacacgaacggagacgcgtggcggcaagggaaggagaaaccgaccacacgccttcgttcgcctattggaggaagggaagaggaaagaatcgaatgctaatcgacgacgatgccggaagattcaaggcccttgtcgtagttgtccttcatctggttcagcgcggtcttcacgtcggcggtgccgttgaccagctcctgcagggaggcattgagctcatcgtagaaggtggaggtcggccaatccgggtagaagccgagctggtcttccttgacggcgtcatcgaactgggccacgaattccttggtgccctcatccttgatggaatcgacgtcggagttgatggccaggccaccctgctcggccatgtaattctggacttccttgctcagggtgatgttgatgaacttggcagccagatccttcttggcggagttctgaggaatgacccagacgttaccggaggagccgacaatcttcttggtgtcagggaacttggagtaggaaacattcagaccggcggcctcttccttgaagcgagcgtgccaccaggtgccggagaagaagatcggattggtgccggtcatgaagttctggccggcgtcctcagccttgaggttggtggaatccttggagatgtagcccttgtcgacccattccttgatcttctcggttgcgtaggtgagcggttcggaattccaatcgaccttgccgtcgtacatctcgtaggccttgatgaacttgtcatcggccttggagagcaccagctgccaccacaggtgctgggtcgggtactcggcggagccgacggacagtgcggtgatgccgttctccttgaacttggccatcgcgctttccagctcgtcgaaggtggtcggaatcgcgatgccgtatttgtcgaacatgtcctggttgaagtagagcaggcagtcctcaccgtagttggtgatgccgtaccagtcgccggagcccatcacgccttgctcatcgtacttgccggtgtcggccaaggaaccggtaatgatcttgtcccagccatattcggacacgtaatcgttgagattggtgagcaggccttggctggcgagcaggccggacgtggcgttgcccttgttgtattccataacgtccggagcgtcgtcggagttgaggatctgggaggcgttctggcgaatctgttcgaaggccttcttctcgaattcgaccttgacaccggtctccttttcgaagatttcgatagccttgtcccacgccttgccttgcgctgtggtcgattcctcgtagtgccagatcttgatggaggtggggttctcctcctgtgcgacttcaccgctgccaccacagccagcaacaccgatcatggtcgcaactgcaagtccagcggcgataaatttgcgagtcgacttcatcgttttctccttttcagcttctttactgatgagagaacatttcgacgattattgaaaccagtcgaaatgccatccactggaaatataacggattggcaacgacgttctcaaattatttcgataaatttcgacgttaatttcaacgacttttcgatgtgagcgctctcattcttaacgctgttaattcatgttcggaatactgcataaaatgtgactattcacataaggcgaatagccataaacacccgagctcctgtcagctgcgcgagcatttcgccatggtgccacgtgcgatataacgcgaaggaagcatctccacacggccgacatcgtcacggtcgccgttgagcacctccatcatgagatccactgcacgcgagcaggtttcggtcggcatcatcggcatctcatccacaccacgcggcaaagatcccagcccatgcgtgcatgcggccatcaccgaaacgtcatcgggcacgcgcaatccacgatcctgcagaccgttgagcacgttggccacatgcgccgcattcgtctggcaaatgatcatggaaatcgccgggtcttcaaggaatgtctcatccaacatcagattgacgtcgtcacgcccattgccggtagagggcttgaagatcacggatatgccgagatcatcgccctttttctttgcggcgtcaagaaaacggaccaggtaattggagccgtcttcatacgcgctgctgtccacgccggacaccagcacatggcgatgccccagcgcatacgccttctccatcgcctcgcgacccatacgctcgaaatccaaatccaccgaatacaccgcatcggaattgctcgggtacccgaccgccaccacaggcatgtcgagagcgcgagccacatcggcacgggcatcgcacatcagcacatccaacagcaggatgccatcgaccatgccttcggcggcgacccgggtcagttcctgatcgccgtattcgtgcatgagcagcagaaggtcatacccatatcgcttggcgcgtatggcgagcgcaaagaagaacacggcgtaattcgagtaatcggtgtattcatggagcggcgaactcaacgccagaaccttggtcgggccgctatgccgcagctcctgagtgcgactcggcatatatcccagctctttcgccgctttcagcacctttcgtttggtctcttctttgatggagcgctttccgctcatcacatacgacaccgtgctaatcgatacgccggcacgtgccgccacatctttgatacctgccaccaccacacccccttaatggacccaccacaccacgaatgttgactctttatcatacgttatatacgccggtctcacacattttcatgctttatgcaaaaatgtgaggcatacgcacattccccatcaaacgcacaggtgcaagaatggcagcaattcgccatttttgaaatcaccatgtgcgtttgacggcgcgtaagcctcaccttgttctcagcaggaccgaatttctgtgagctccctatagcgctcccctacgcaatatgtccgcaaacgaccacaccacatgggcgatacgcgccaattcggcgtagcggccgatggacagccactgcacacggtaccgttcgaaccacaactccagatcggcggcaagacgggcgcggcgcgaggcatccagcgcacggccggtcacatccttggtgtcacaggcgtcctcgccgccagccagtaccagcagttcctcgcccagtctattgaacaaccgctgcccatccagcatcacccacagcagttccgggttcaatcctcctcgtgccgagccatcgagcaccgcaacaaccgcactgccgcaatcgatcaacgcccggtcgcaatcccggcgtcgttcgagtcgggcatggttccgcaggagcagccggcggcgcgcatcggcgcatcccagcgtacggtcaaacacgagctctcccccgcacgaccgttccacatacgatgccacatccgtattcagcatgccggtgccggaaccgtattccagctccagcacctgcacggcaaggtcccaggggaatgacaccccatcggagtcgatgcggacgaggcaatccatgatgcgaccggactcgtcgccatacaccagaacggagatccgacggttcatctcatgcgcatcgatctcaatcggattccacgcgttctgagcgccataacacaggcccggcacgctcagacgcggatcgttgacgtggccgtaatcgccccaatcggtgaccaccatgccttccgcgccatacttgacacccgccaatgccatgtgatacgtgttcagccaggcacccgcataatcggggaagaaccggctccaagcccgcaccgcggggcacacgaactggcgacggccctgcgcggcgatggtctggatgttgctctcgtcgatctgcggctcgtacatccagttgagcatcgtgatgtcgccgggcagcagatccatcgtgcgcgggctttcgagcgcgatgtccgcccacaacatcggctgccgaccatggcgggcgagcgtttcgcacaaatccctgacgaaaccggcatacagttcatcgcggccggcttccggcgcgtcctgcgcggacctgccacgtcccaagtcgaacgtctcatcgccgccgatattgaaggacttcgaacggaacagcggcgcgtattcctcaatcaggcgcgaggcgaaatcatgggccttgggatcggcggcgttcagcgtgtgatgctccatgcgttcgatgaagctgaacgggcggtcggcgtcttcggggaactcacccagcccgcgatgctcacgggtgcgcagattcatgtacatgtgcccgaacgtggccaacgacggcaccaactcgatgccgcgacgcgcgcagtactcgtccagatacgtgatgtcggcggccgtgagcggatcggtgccacgccacgccacgctgagctcgacgaacgcgaaggcatgctcgacatacagctggaactgattgtatttatataaggccagctggtcgacgaaccaggtgaggaactccatcgtcggcactcgtccgcgtgtcacgtcgagactgtaggcgcgcaccgcgaacgcgggcttgtcttggatatgcaggcagggaatggcacgcgaggtctgcccgatgatctgccgcagcgtctgcagaccgtaccgcagcccgctttcgccgccgccacgcacggcgatggtatctgaggcgaacacatccagcgtgtattcgtcatgcgccaatcgtgaatccaggcccagggatatgacggtgccgttcatcgctgccggcgcacccgcacgcgcatctcgcgcatcttcggcggcattggcgctggcgtcgtcttcacctgtggctgcacggacacggcgcgtacggacggtgacgccgcagtaacgctcgagctcgctggacagctgctcaatcggcagcgtttcccaagtctcatcggcaccttcggtggcggcatattcgggaattcgtttctcgatcgtcaccagggacccgatcatagccgtgccatgcgtgtattccaatgtcaccggagcgggaatcagggtgagacacagcgttgcggcatcgactgtatattcgaatgtgggcacagctgttcctttcatactgtttttattatcgttcgtccgctaatggcaggcgacacgtggtcgcgccgccatcagcggacgaatcgttggtgaggtacggcggcatacgctatttcacggcaccggtcgtcacgcccttcatgatgttacgctggatgagcatgaagaacaccaccaccggcagcgagaagatcaccgaagcggccatctgcccgccaaaatcggtgcccatggtgggtgtcgagaaggacgacagccataccggcagcgtgtacttcgactggtccttcatgaacgtataggcgatcatgtagtcgttccaggcgttgatgaacgcgaacaccgaggtcgagacgatgccgggcgcggccagcgggaaggtgatcttccacaggatctgccagtcgttcgcgccttccacggccgcggattcgaagatgtccttcgggatgttcaggaagaacccacgcatgttccagatcgcgaacggcagcaccatggcgatgtacgccaagatcagaccgctgtatttgttgagcagcccgagctggttgtagatgatgaactgcgggatgatgccgccggaggtcatctggatggccagtacgaacaccatgatcggcttgcggccgcggaagcggtacagggtcagggccgcgcacgcgaagaacgcgacgatgatcgacaggacgatcgagatggcggtcacgaccacgctgttcttgaggttggtcaggaacgaggtctgcgtcacggcaacgatgaagttgtcgaacgagaggtgcgtgggccagaacacgggggtcgtggtcatgatctcatcgcgaggctttacggcggtgataatcatccagtagaccgggaagaaccatacgacgcagaacagcagggcgaggatagtggtgccggcgcggcgcgcgatcttgccggggttggttcggcggcggggcgatgcggactgcgctgcggcctgcgatacggcctgtgcaggacttgcactcattgacgtactcataggtcctctcctgacttgagcaggtaacggatgtacacggaggtcagcgcgagcagcacgatggtcacgagcacggaggcggccgaaccggtgccgatttcgaagctgacgaacgccttcttataggtgaagatgccgatggtggcggtcgtgtcctgtgggccgccctgcgagatgagccagatctggttgaacacgttgaagtcccagataatcgagagcatggtgatgaccatgatgctcggggagatcagcggcacgacgatctgccagtagcagcgcagcttgctgcagccatccagctgggcggcctcgatgcaggactggtcgacctgggtggtggccgcgtacagcgtgatggcgatgtatggcacggcctgccagaccacgagcagccagatctccagaaatgcgagccaggtgttgtcgatccaggaggtgttggtcatgtcgccgaagacgtgcagctgggtgagcagccagttgatgacgccgtaaccgggctggaacagccacttccagaccaccgaggatgcgacgttcggcatggcccacgcgaagatgagcacgaagatgaccaggtagcgcatcacaccgccgagtttggtcatcagctgggcgactcccatgccggccagcacgctgccggccacgagggctgcggtgaagccgaaggtgcgtagcagggccgcatagaaggccgggtcggtgagtacggattggtattgcttgaggccgacgaagtcgaattcgccggtgaacagcgtgcgctggctgaaatccgtgaaggacgtgaagatcatgaatcccagcgggatgaccaccagtgcgatgatgacgatgccggcgggcgtcagcaggaacgccggggcgcgattgccgcgtttcttagccggccgtgaggccggggcctcgccgtgcgcgagttgcgttgagcttgtcatggtccgacccatcacttggcatacagctcgttggcgtgttcgtcgaacttcttggcggaggcctcggccttgctggtgtcggtggcgatgtccttgaacagggtcagcgagccgtcgctttcgatggtggtccactgcggggaggcgggcgtggccttggtgcgcttggcggcctcgaagaagccggtcagggcggtcgggaagtcgtcggaggccatggccttgtccagtccttcgacgttgttgggcaggtagccgtccttggcgaacacgtagtcgttctggatgtcagggctggaggcgatcttgatccacttcagggccagatcctgcttggagctcttctgggccacgccccacacggagccggccatcatcgacggctggttttggccgctcaggccgggcatcgggaaggagccgagttcgtcggcggtgatgtctttgttgtattcctgaatcacgcggatggaggcgctgttgccgattacggcgccgatcttgccttcggccatgagctggctggtgtcggggctatcggtgtcgagcgggcgggaggcttcggatgaccacttgtgctggaattcacgccactgctcaaggccggacaccgattccttggtggacagggagctgacccatttgccgtccttctgcacggcgtagtcgccaccggcgtcccacacccactggatggcggtcttccaatcggcacccggcacatagaacggggtgaagtcctcgccttggtgcgcgtccttgagaatctgcaggtcggcttcaagctcggcgtaggtggtcggcggctcgttgatgccggccgcggcccaggtcttcttgttgtagaccactgcgcgggcggcaccgagggccggaatgccgtacagcttgccgtccacggtggcaggctcttccagaccggagagccaggtgacgccctggcgcaactcgtcagcgtggtcggtcaggtccatgaggccgccgctggccgcgaagccggcgacctgcgtattgccgaggtcgagcacgtcggggggggtgctggtggacagagccgtggtgattttggtgctgatgtccttccactgctggttctggatgttgacctcgacgccggtctctttggtgaactggtcgttgatggccttgatggtggcctcgctttgatcgccctgcatgacccagacggtgagcttgccatcgctcgaaccggtgtccgaggatggtgcgcccatcgagcatccggcgagggtaagggccgctgccgtgacgatggccgtggcctggagcaccctgcggatggcggggcgtacgttgtgctgctgcttcatgatgttccttcccgtccagttgtgaaccgttgcggctcgcttgatctggccgtctccattgactggtgatttcttgtaaacgtttacgagaaggagtataacactcacgtaaaggtttacaaatatcatgtgcgtgtcgtacttcacttaatatcggtaaatctcttttactatttacttcgtacacccttacggcagagaatgtttaccgactttcatacgccggcacggcaatccacaggcaccggacatgggccatgcggaatcatcaggaaaatcgcgcggtacaatcactgtgaacggccctaggacaggaaggagacgggcatggccataccccgtaagccggccactatcatggacgtcgccgcggcatccggcgtctcctacgccaccgtctcccgttatctcaacggcaatccgcatgtctcggccaaggcagccgagcgcatcgccgccgccgtcaagcaggtgaactacacgccgaacaacgccgcccgatcattggtacgccaacgcacgcaaaccgtggcgttcgtggtgcacgggcagccggattcgctaatcgccgaccccaatatcaacaccatcctgctcaacgccaaccagacgctcggcaatgccgattatcaactcatcacgctgatctccgactcccctgcggccggcgcacgcatcgccagactcgcctccagcggattcgccgacggatggattctcaacacgttccataaagatgacccgctatttcagagattcgccaatatcagcgtgccggtcgccatttccggcgtcggctatggcagcgccatccccttccccaccgtcgatatcgacaatcgactcgcttcacgcaagctcaccgagcatatgttggggcgcgggtatcggcgaatcgcctatatcatcggaccgccgtacttgccatgttccgacgaacgactgctcggattccaggatgcgatggccggcgatttcgacccggcactggtcattcggtccgacggctggacccggcccgatggccgcaacgccgtcgtgcggctgctggactcgctggctgagccgtcgggtagccgacttgccggcgccgacgccagcgtgcccgagctcctcgccgagcatcatatcgacgcgctgatatgcggcagtgattgcatcgccgctggagccatgaattatctgctcgaccgcggcgtgcgtgtgcccgacgatattgccattgccggcttcgacgacagcgccgacgccacagccatgcacccgcagctgaccaccgtgcaccagccaatggacgcattcggcgtcagcttggccaccctagtgcttgaccagatcgagggccgaccgttccagcgcacggtgttcctgcccaccgaggtcgtggccagaggctccaccggagagtaggcgcgcagagaacggttctcaataatatctgtgcgcacttctctacgcccgaagcgcacatgggatatgccctaatcactgccatgtcgccatttgcgatgatgtgagattgttatgttcttgttcatttgagcgcacagatactactgagaaccgttctctgcgcaaatagacaatgtggataactccataagctggaaccacattgccctgcctggcttgcattcaagtccaaatcagctttacggtcgcatcatgagctcttttatgcatgaggatattgtcggccgacgccgagcagaacgtgaacgttgcaatgatgctgcgcgccgttcaaaaggtccattgctggtgggatacatcaatgcggccaactactacggcgcgcccatcccccgacattgcacgctatctgttgatgccgtgcacgcctgtgtttccagtgccaacaaacgcagacgaatcaaaggcgtggtcttccatgtgtttaagggaaaactggatatccgcaaaaaggactatgaacatttctggattgcctcgccggtcatgatgtgggctcagatggcccaatactccacattggaggaacttgcggccattggagcctctttgatgagccgcgataaacggcgcagaatggccactcgcaaggatttcgatacttacttggaaatcagtccgcggttcataggtcgtaacaaatgccacgaggcactgccctacatgacagagaacacggattctccgccggaaaacacgctgtttgggatgctgaaggattcgggcttgggatgccccaccgccaactatcgcgtgaatatcggcaactcatacgtcatattggatatggcatatccggactgccgcgtcgcgttcgaatatcagggagcctatcacgccgatccggcacaaatgcgaattgacgcggcaaagcgaaacgcattgcaactgctcggctggatcgccattctcgtcactgcggatgacctgagaacagccgacacgcggcatcgttttatcgagatggcccatgtcgtggtgtcccggcaacgcaatctcgccgattggaaccgctcatgggccattacctcttagcatcgcaccgataatgcgctatgccgctatttaccgcgaggtgcccgccagacatcgggctcgacgtagatcccccattcataccaaggcagcgcggcacggcgtcctcgtccatgtgaatggcctgcgggttaatgcagcctatccacgccggcagtgcgctccactgcctcgaccaccaggtcgcgggtgctgtggtcaagcgattcgcccaccagcagcgagccggacttaaacgccagcgccgcctacaaaagtgtgaggccgcgcaggctcacactgccaacagccgttcagccaaccctcggaaggtctggccaatgccatccgtgcgcaaggcgccatcgacatccagcaccgcgggacggcctgcttcgccgatctcgcgcacttcgggttccagcggcagctgggccatcagcggcacgtcatagccaagcgccgcgcttaactgttcagacacgcgctgaccgccgccggcaccgaaaatctccagcttctcgcccttgtgctcgtagtagctcatgttctccaccacgccacgcaccttcatcggcacctgcagggccacgagtccggagcgcacggcgatgtcggaggcagagggctgcggggtggtgaccaccacgagttcggcgttgggcagcgcctgggccacggaaatcgccatgtcgccggtgccgggagccaagtcgagcaagaggacgtccggctcgccccaccatacgtcagacaggaactgttccaaggagcgctgcagtcgcggcccgcgccacagaatcgcccggtcggcaccggcgaacatgccgatggagatcagtttcacgccccacgcggtgaccggcataagcataccgttcagattggtaggctgcgtgtgcacgccgaacaggcgcggcagtgagaagccatagatgtccgcgtcgatggcggccgtgtcgaagccgagggccgcaaacgtggcggccaggttcgcggtaaccgaagacttgccgacgccgcccttgcccgaggcgatggcgaagatgcgggtcttgacgcccggcttgctgaaggggttctgcttgcgttcggccttgaggtcggcaaccagatcggccagcttgtcacgactcattgaaccgacttcgatatgaggcagcagctgtacgcccggataggagctgaccgcgccgttgatctggttggtgatggtctcgctcagtgggcatccgggaaccgtcagctcaacgtgcacggtgacgtcgtaagtgccggcgtccgacgatgcgggcgcggcttcgatagcggcaatcatgccgaggtcggtgaccgaacgaccgagctcggggtcgatgaccttgctcaggcgttcgtagatgtcggcttcgatctgacgtgcgtcgctcataaatccgtatcctcctttagggcctgttctaccctagcgtgtgatgcggcggcatgccagagggagtggagtaagtcacactggggcgggattcgcttttcctctcccccagtcagcctaaaggctgacagccccctcatcagagggggttaatgaagcgtctgagggggctattttagatggtgccggtggctaggagctgggcgaattgggcttcgcccagcatggggatgccgagttcctcagccttggtggccttggagccggcgtttgcgccgatcaccacgtaatcggtcttcttgctcaccgaaccggccgccttgccgccgcgctcgataatcgcctctttggcggagtcgcgcgaatagccctccagagaaccggtgaccaccacggttttgccggctagcgtctgcggcagcgaactggtctcggcctcgtcgacgcccacgccggcggcctgccaagcacgcaaagtcgcgccgcgccagtcgccgggctcgcgggcggcggcgaaccagttcaccaccgattcggcgatttccgggcccaccccgtcgatggccgtcagatcttcaatcgtggcgttttcgatggctgccagcgagcccatcgccgaggcgatcaggcgtgcggtaggcggaccgagccggcgaatcgacaacgcgaccagcacacgccacaggtcggcgtgacgggccttgtccatttcgtcgaacatcttgcgcgtgttttcgccgggccgaacgatcaccggcacatccgtgacgccggtgcgcgtggtcttgtggtccacgcgcacgatgaccgcgtcggccggcacgtcatactcgggataggaggctgcggcaaagcccggcatagtaccaagtggagcctcagccccggtaggtgcgccggtcgtctcgctggcggcacctccctgtgttccggcagattcgattgcggcctccctttgcgcgcgttcggccagctgcttggccgtgagcttcttggccggcgtgggcgcggtccagaaggcgggcacctgatgccacaggccagagccaccgacacgcttacgcacctttttcttcttaccgttcgcaccgatcgtctcatgcacctcgacgattgcggcctcacgccacacgcgcacgtcgcgcagatcggcggcggtcaggtcgaacaacccggattcgttggacaacaccggcttctgcgcggccggcaattccagcccttccaccggctcatacggttcgggctcttcgccgggggcgaccagcacctcggtgatgttcggcgcgtaggtcgccaccgaatcaggccggttctcctccgggttggtcagagcgatggccgattgttcacccagatgctcgatgtcgaacgccttgcgtgaggccagcgaaatcacgcgctcggtcaactgggccgggcagctttccacattcgggcagcggatgtccttgtcaccctccttggcgggtgccagtttcgcgccgcatgaaggacagaactcgggcatgacgaattcgcgcagctggccctcacgccctttgcgccgttcaagcaccggaccgaccagttcgggaatcacatcgccggccttgcgcaccaccacggtgtcgccgatcaggatgcccttgcgtttgacttcaaatccgttgtgcagcgtggtacgagccacggtggagccggccacgtagacaggtttgagcacggcgaccggcgtcacacggccggtacgccccacctgcacggtgatgttgagcagttcggtgttgacctcttcgggcgggtatttgtaggcgatggcccagcgcggcgcgcgcgaggtggcaccgagggtgcgctgcaggcccaggtcatcgaccttgacgacaatgccgtcgagcgcgtgctcgatgtcgccgcgatgctcgccgtagtactcgatcatgtccaggatctcctggaatgaggtcaccgcacgattgtgcggggagaccggcacgccccacctggtgtatagatcgtaggcttgcgactggtcggcgaccacatcatgggtgccgcgcggatggtccgccccccagatgagctgccccagaccatgcgcatagaagctcaggcgacgggtggcggtgatgcgagggtctttttgacgcagcgagccggcggcggcgttgcgcgggttggcgaagggcgctcgtccggcgtcctcctgctcgttgttcagggtgtggaagtcatcccagcgcatgaacacttcgcctcggatttccacgaagtccggaacgtcttccttggggccgccgaggttggcgggaatggagccgatggttcgcacattcagggtgatgtcttcgccggtaacgccgtcgccgcgcgtcaggccctgttcaagcacgccgttgcgatagatgaggttcagggcgaggccgtcgattttgacctcgcagctcatgggcaggggcttggattcgggccaatcgaggtcgcgaatcaccgaatcgtaccaatccttgagctcttcgatggagaagacgtcatcaaggctcatcatgcggctggggtggcgcacggaggcgaagtcgttggagaaggagccgccgacgcgatgggtgggcgactgtggattgtccaatgaggggaacgccgcttcgagtcgttcgaggcaacgcatgcgcgcgtcgtaggcggcgtcggagctgacgggtgagtcgtcgatgtagtaggcgatctgatcggattccacccatgcggccacgcgagcccacaggcgggcggcggcctcagcggtcatcgtgttcacgtcgaaacggtcgaggcgtatcgcgtcgtcgtcagtgggctgcagtgcggctatccattgttcggagccaggggcaaaacgtgcaataccggtatcaggccggacctcggccacatccccatcgtcgaaatcccatgccagttgttcgttcgtgctcatggttgtctatcctagcgggctcggctcccctcggccggctataccgtcaactcccctcaggcggctacgcggatagcgagcgcaggaactgggcttggatgatgtcgatgttgtcgccttcaccgtcattcatgcgggccacggccaccgagagcgtgcgggccggcacgaacatgccttcatccacgcacacgcgggcggcgtcacgcacgatgtcagccacttcgttatgcggccagaccggcagatcatgcatggcaagcacatgggcggccgtctccaccgattcaggcaccggcatgcactgcgagtccgcacgggaaaccagttcctgcagttcgctctccagcgaaccaatggccccgggagcgatgtgatcgctcataatgtaggctgcggcggctgtgtcgaaccggtcaagcatccattcggcgtacgcgaaccggtagtaggcgaacgcggcatcgtcgcggtccaaggccacgcgcagagcattcaggcaggcggcgcgtgccgaatcccaatcctcattgcgggccagttggatggcgagcttcagatgtgagagcgggtaggcgggcgcgtacgccaccatacggttgaggtgcgggatggccgcctcggcacccttgatctggctcaacacgtcagccagctccatgtgtgcgtagaacagattgtccgggatgagcaccgtacgctcgtccaatgtggcgaacagtcggttgtagaccacgcgctcggcataggagttgaagtatcgaggtacgccatggcctgccgcatacacctgatccaaatgggccacagccgcttcggccgcttcgatggcctgatcggcttggcccgagaacagcatgtctcgggcgcgcagacgctccttgtcaagatcgtcggcaagcgtgaacgtgaagtccggggtgtccttgccatcgatcaacgcactggtgacctgagaggccaaaccggtcagttcgggatcgcatatcgattcgatgatctgcatggctcgctgggccttttccacggagccgagtgacgtgttcctggcgatatcgtggaattcgttgacgccatgctgcagtaagtccactcgctggatagccagtccggcactattctgtgcgcccagcacgtgagcggtcgccgggctgaattgacggtcggccagttcgggctcctcctgggatccggtgggagagaaccggctgtccgccaagtcgaagtcggcgctgatgggtttcaggccgccttcgccgtccacgtccatcacggcaccgaacatgcggtaggtttcctcgggattgtcaagcccatcggtgtccagtcgcttgaggaaggcatcacgggtgaaggtgacggtgaccatattgcgcacggtgggattgcggcgcagcacgctcatcggatcatcgtccatgccggcggccccatcagcatcgtcagtgccgacgccctcgccgccgataccgcccaggtcgtcgcctgcgccggtatcgtccggcatgccgaacgccatttcgtcgatatcgacgcccttcatcaggtcttcgaactgcgaatcgatggacgcggcgccatcggcgtcagcggattcggccgcggcctgatccgtagcatccgcagacggtccggtaccgttgcctgttcccccggccgtgccgcgttcgtcaccggacgccgcctgcccgaacgtctcctcatgggtgatggggcgggtcgggtcgccatggaaatcaccatctttggggtcggctttggaacccacacgccccaaatcgccactgcgcagatgttcgaaggcgcttagggcctcgctcatcatcgcctcgatggcggaatcctgttcggcaatcgcctcttcaagaccaatggaatcgatgtgcaacgacacctggcgcacggattcgctggtgccgaaactcagcgctgccatcatcaggccgacacgcaggttgtaggcggcgctcatcgacgcgcgttcggcgctactcagcgcacgccacgtacggcgagtggtgtcataccggctatcgggcatcatcgaggtgccggcagtggtgaagccaatggccacttcacccgaatccaagcgcgaccggaactccacatcaaaccgatacggcaaccgtaaccggcgcaacagtgaggagagggtctgacgatacacccattcgtcgctcctcgccggcgaatacgaaggccgagcggcttgagtgttggtgtcgctcttattggtccgctctacagcgccctcaacactctcagcactttcagcgcccgcagcattcgtcacacccgaatccggcacgttctgctgggtcagcacatctcgaggatcagggaattcactgtgaatctgcccagccgtgcgtgcggcgatatcgaccaggctcagcacggcccgacgctcctgctcgccatcatacgggtcaagcgccataatcgcagggttctcaatgagtttcatgtcgatttgcgcggcctcggcacgggtcaccgtatcttccgtagggttgcgccccaaggaagcgttgcgctccagccaagcgctcaccgcagcgaatcggttgaggttgccttcgatcttcaaggatttcagcgcctgcccgaatgccaaggacttatcccacgtaaagaaatagccgctcgaatacgtcgaggtgtacaggtgcaacggttcggcgccatgcaccgcttccagtcccggcgtggtgtcgagggcgccggcttcgcgcatcagatcggcgaagtgatcctccagaccggaggcccgcatgccgtgggctcgtgccgccaaagtgtcacgcaccgaacggcgaatcgcaccgattggcgcctcacggttgagacggcggaagatattgccggaaccgaatccgatgagcagaccattgatctgcggcaacatatacgtggcgaagaacgcgatggtaatggcatcgcggtattccaaatcatgacgcatcacaggcggcagattggcacgcatctgctcaagcgtgtaccggttgccggccttgagccatgaggcgagccacgtcatgcgtccggtgtcgtcacgccccaccacgccaccggtaatggccttcacgccgtcagcaccatgaccaaggccacgccccaaaccacgcccatgatgcagcgcacttcccaggccatggcctgcacgggagaaaccggaacgtgaacgcggctcgtcgctttcgcccagccgctcaccgtccggcagagtcacttccttttccttgccgaacatgaatcgcgcctgcatatcctgcacgtccatgttggggtcggtgcccacgaatacgcggccatgcgtatcggcgaacgccacctgcgcaaaatgatcgcggtcggggaaaatgccaagcgaaaagccacggcctctggtggagggcagctgcgcccatccaagcaccagcccttccggcacgttctccaattcggggaaggtgcgtcgcttgattacaggactcagcgccactgcatggcgagtcagttcgtcgataatgccgcctttacgctcactggtctcccgcaaggcatcgccgaacggattcgtatcgtgcttcttcggcttggacagtcccagatcggccgcgagcgcgttcatcgaatccttcagcccgcccagcagtggcgtgcggttgtgcttcccatggtccgatgtacgttttggcatgattcacattgtctcttgtttgcccgacatcaagcccgaataaagcctatagaataaatgcgtgcattccatagaccacactcgcgcagaccgtccgatgccgtcgaatcatgaacggcacctgcccagccgcccggatacccggcaccggctgcgtttggtgcgcctgctgatcgccttgctggccgccgtcgccgccatcgccgccatggagtgcatcgtgttcaacctgccgttctggcgtacgctcggagcgagcacggatacgaacgccgtgcataacacgctgggttcgggtctcacgcgccggaatgatggcatgttgaccgtcaccgatccgaccaaggcctatcttgaactgaccgcggacggcacgtcggattacctacgcatcgataccgagagcagcaaggtcatcgataaggcccgcgagcaggccgaggccgaatccaaagcgaacgacgataaggaagtcttcaaaccgctggcgaccattcatgtgcgcgcggatgtcgatggcatcaccggcaaggcccagtcgatgaatcccgacgctattcgcagccattatgtcaaggcgccgggtgccggcatcgtgcgtatttggattcaggaagagcgcggcgcgatcgtaccggtcaccgacgcccgcgccaacgtgcgcgtaccgttcgtcatcaattggatgcgcgtgctcgccatggccttggtgttgctgatgattgccgtctggaggccgggatcgcgcctgtggcgtatcacgcttgacccgtccagcactcggcaacgacttgctttcgtggggcttctggcgattcctaccctgcttatcggcgtatccatcatccacgaactgtggtacgcgtcttcgctcgtcttccacgtttccggcgattacacctatgatttcgaccagtatgggcatgtggccgatgcgctggtcgccggccggccctggctcgacttgccggttcccgaacaactggccgccaccgagcacccctatgacgtagccacacgtgcccagctactcgccaatggagccagtccgctctactgggattacgcgtattatgacggtcactggtattcctattttggcgtgttgcccgcagtgctgctgttcgtcccctatcgtctgctggccggtcataatctgccgacatccgccgccgagtatattctcgtgctgctgttcatcatcttcttctccttgctggtgctgcgcgtcatccatcgtgtgatgccgaagacttcggtggcggtcgcgtcgttagtagtggtctcatcgttggtgagcgcgcaagtggggtatttgctgtatcgcacgaacttctatcagataccgttcgccgcatcgctgacgttgacgtcgctgggactatggctatggctcggcgcggacacgtcccgccgtccgctgagaccatcggaccgatggcaggcgggcgatgccaagcctctctccctgccacgactggccttgggcgccttgtgcattgcggcgaatttcggatgccgaccgacgttcaccttggccgcattgcttgcgttccccctgttctggccgcagattcgcgcgctgggcaccggtctgcgcacacgccgcatcaagccgttgcaggcgttgcgcgcgccgctggcggtaatcattcccgccattctcgtcgtgacgcctctgatggcgtggaacatggttcggttcgattccccgttcaatttcggcaatgcgtatcagttctccatatccgatatgacccggtataccaccccgtccgcggatatgcccgccaacatctggtattacctgttcctgccgctgcgcttcatggatcgtttcccgtggctggcgggctctcccgccccgatgccgcaatggggttattacgaggtgatggtcggcgcgattttcacggccacgccactgaccttgatggctttggcgctgcccctgctgcgcagattggaaacacacggcatgcggccatggctgatgtcttgcttggccgtggcggcggtgctggtcgtattcgacagccgcgtcggcggtttgggatggcggtattccgccgatttcggctggctgatctcgctggcgtccataccggggctactgtggctggtcaatgggcgcgaaccgagccggtcattggcgggggccaacgacgccgcttcagacgatggcatcgcccgcgtcactccgtggcgttggctgatgcgctgggtcgtggtgctggccgtattgtgggcgctgggcatagccatactgagctgcttcgtgcagtcgcgcagcgattcgatgatcgacaacaatccgacgctctggcatcaggttcaggcatggttcacgatgctctagtctcgtatcggcgtcggatcaggtcctcataaaacgccacagcctcagccggagctccgtcaaacacgaccgcgtgctcgtccagcaccagtatgcggtcgatggcgtattcgggccggcggatcatatccgtgtcatgcgtggcgaaaatcacctgcttgttgtagctgaacaacgccttggccacatgcgcggtgccaatctcatccaatcccttgctcggctcatccgccacaatcgcactcggctcaaagctcagcgcggccgcaatagccagcaggtgccgtttctcggagtccaattcgccggccttggccttggagacctgcgccaaatcaaaatgcgcgaacagattaccgatgcgcgcatgacgttctgactcgggcaccttgtgctttttcaacgcttcggaaacagcctcggaaatattcgccgcttggtagaaactgttcggaatctcctcgcggcgaactttgccgaccagattatcgatgcgcttcgcgtccttcttcacagccgggtcaagacgttcctcaccgcccgcaatggtcaccgtgccggcgttggccttcaacgaaccgtccagcagacccagcaatgtggatttgcctgcgccgttcagtccgatcacggccacccgccgctcgctgatggtgatgtccgtgggagcaagtcccacgtgcccatcatcatacgtatgcccggcctgattcaaagtgaacgtcagcgatgccgggcgtggcagttctttcgttctaaacaagaatcccatgccgccattgtacgtggagtacaggtgtggtgccggcaaacaccggcctatcgcagcaaagcggcgacggtattgagcacggcgcggatgccacgctcgaattcgtccggttcgggcagcagggaaacggccaggtatccattggaggtcatgtcgaagaagtagccgggctgtccggtgagttggtgctcgtcaatcagccgcaacaccagttcgttctcatcgatgacggaaggcactcgtaacagcacgttccagccgccttcggcccgtagcacgctgaccagcccgttgggatcggcgtcaagcaactcgtgcaacttggccaggttattgcgcacgcgctcccccacccgtctggtctgtgcgggcgcggcgttcaataatgcgggaatccgttcggcgatgatgtcgcccatcggcagataatcgtcggcgatgacgtccagtcgacgctgggcctcggcaacgtcctcggcaggtccggacacctgaatccacccgactttggcgtgcggcgcggccagcattttggagaatccgtctagggcgaaggtgagcacgccgcgctcccccgcgagccgtgcgtcgccggggaaaggttcgagagagtaatcgaagaacacttcatcggcgataagggcgatgccgtgctcacggcacaatgtcacgatacgtgcacgctcggttggttttacgtacgaaccggtcggattgttcgggttgatgagtaccaatgctctgacgcgttcgccaccgggctcgctgagtagccgctcgagttcggcgatgtcgatgaaccaggagccgtcgaattgcaactggtattcgaccgtatcgacgcattcaagccgtgcaatcgactcaatcagcggatagccgggtttgggtgccagcaccgcgtcgccggcatcgcaaagtaacttaatcagccacgaatacgcctcggacgtggagctcagcaggtacagggcgtccgggtcggcgccctcgatggcggtattcacattggtgaaagcggcatggcgctcgttcctgccctcgccggcggcgggcgaagccaactgagggctgcttgcgtctaccacgtttaccgtattgaggaatgcggccaatgattctcgtgccgcacgcggtccacgcgggtcggccgtatacacgctcggcaccaattcgggtgccaacccgtggcgggtcggattggaatcgttgagtttgctgagtgcgatgccgtttgccttggctgccgcctcggccgccgcaatgggattcggcgcagaaatatccacacgagaagagaaatgcacgctcataccctccacgataaaaccacccctgccgagccaggtatatcgaggcctcatatccaccagcatccagcactacgacaatcgtgcggcacggcagcggagtcgtcagacatactatgacttcaatccacatcgaataacggcctagctacattcattaggtcattttcgcgctcattaggtcactgctagtcgagcctcacaattgttgatgcttgaaacgccgccattccgagcccattgcaattcaggtttggaatgggagtgacctaatgaacacataatcgacctaatgaacgaattactcattaaaaaaaggccgcccgaaatacttggacggccttacatatggtcaatacggctcctgcgccagcagaaataactcagctcactgctgcttggtgctggcgtagtaggcggcaccgacgatgccagcctggttacgcagcttggcgggcacaatcggggtcttgatatccacgtacggcaggaacttttcgctctgacggctcacgccgccgccgacggtgaacaggtccgggttgaagtacttttccataaggccgtagtacttggtcagacgcttggcccacttcttgtagcccagttcctcgttctcgcgaatcgcggaggaggcatacttctcggcgtccagatgcttggcgctcaggatgatgtgtccgagttcggtgttcgggatgagcacgccgttgtagatcaaggcggtgccgatgccggtgcccagtgtggtggcgatgaccagaccatcctggcccttggcggcaccgaactggacttcggccaggccggcggcgtcggcgtcgttcaccacgacgaccgggcggccgcaggcttcggagaacacttcagtaacgtccacgccaatccaagactggtcgaggttggccatgaagtcgagcttctggccgggcttgatcggcgcggggaaggcgatgccaacgggtgcggattcaggcacttcgaagtggtcgagctgctgcttgacgattttggccacggcctgaggcgtggagacctcgggagtgagaatcttcaatcgcggctcggcgaaatcgcccttggtcagatcgacaggtgcggccttgatgccggaaccgccaatgtcaacaccgaaagcctgtgcagtttcaatcatcgttgaccttcctttccatacgttttcatcagttcgtagggttgcgcccagtctaacgcgaccatcacgcggacgcgccggacgggccggggcatggccgtcactcaagcgacggcatgggcttccaggtggggtcgtgcatcagcttgcgcgagtcccaccagcccttggcaatctgcaccaaaccggtcttgaggtgctcgcgatccaccatcaccaggcgaatgacttccttggccgcggtgagcacggtacccagtccaaacaccagcggacggaagtcaccataggtcatgaagtaccgggccatgtatccgcggttgcgcatgatgtggtaccggttcatgtcggacgtggagttgagctggcgcacgccggcgatatcccagttgccgatttcgcgcgtacggcgcaaaatcacgtcgggcaccacaatcgggttggtgaccttgctggcgcggtagccatacatcgtgtcatcccagtagatgaagaagcgcgggtccggcagaccgatttccgtgaccacacggcggttgaacaggccgccttcgaagcacagcgtgtccatcactcgatacccggccgggccgaatgcggcgggcgcgatcgggttcgggatgcccagcggcacaatgaagtcgtactgccagtagaacgggccgccatcgtaatcgaatcgggatccctgaatcacctcgtgcttgtcggtccacttggacagcttggcaatggcgtccggcagcacggccacatcgtcatccatcacccagaaccatgcggcgcccagatcatacgccttggccacgccggcggagaaaccgcccgcaccacccatgttctcggtctgcggcgcatagaccacgcgctcttcgttgccggactggtcggccacggtggtgccccactggccggtcaccttgccggcaaacgcagcgaccatgtccgccgtctgatcggactgctcattgtccacgatgacaatgcgccacggtgcctgctcaagcgccagaatcgaatcgaacagtacctcgagcagctgctgacgtttgtaggtggtgacgatcagggcaagcttgtcaatggtgttgttgggtttcttcacttcagccatggctcccattgttgcacttgaccggcacaagacgaatttctgcacagtgaaacgcgggttgcgtacgtccggcgcatggcgtatgaataagcctgtcagtttcagggaaggtgcaattccttactggcggtaacctgtaccccgggtttcataacggggatggcgggaagcccgcgacccgcgcaagcggctgatccggtgagattccggagccaacggtatagtccggatggaagaaacgagggctcattatgagcgtatcttcgcgtatccgcatgcaagttgttcgttctgtggcgcccgaggccgagggttcggccagcgcgtccaccgccagcaccagcgccaaactcggctcgcacaccactggtgtggccgattccggccgctggtccacgcgccgtatcgccatgtatgcactgttcgtggcgctggcgatggtcaccagcttcattgaattcccgattacgccggtcacttggctgaagtacgacccgtccggcatcgtctgcctgatcgccggctttgcgtacggtccggccgccgccgcaatcgtgtctgtgctcggctttgtgccgcacatgttcgccgacccgtggggttcgctgatggctgtgctggtggcgctgttcctgtctgtgccggccgcgttcatctaccgtaagatccgtacgcgcaagggtgccgccatcggcattctggtgggtgcggtgctggccatcgtggtggcgctggtgggcaacctcatcatcacgccgatttacgcgcacatgccctaccaggctgtggccgcgatgattctgccgattctgctgccgttcaacgtggctaagatggcgattcacgccgtgatcaccttcctgatctacaagccggtctccaacctgctgtccaagcagcagtgaccggcctgagacgggcctatgcccgccacgactaacgaccactcaacgaccactcaaagaacaagaacgcagaactccggcccttgccgggattctgcgttttcgcctatcagttacggattgctgtttcatgaccgttgcaccccattccttcgacgccgacgagttccacgattccgccgagcccgctccccccgccgccgtactcaaggacattcgtttcagctatgaccgcggcacttcatgggctttggatggcgtttcgctcacggtccatgccggcgagcgcctatgcttggtcggtccgaatggatcgggcaagtccacgttggcccgtctaattgcgggattgaccgcgccggacggtggcgaagtgacgctactggaacagcgcgtgtacgcagccggcccgaatgccgacgcctatcgcgctgcccgccgcagcatcggtatggtgtttcagaatcccgaggatcagctggtcaccaccgtgttggaggatgacgtggcttttggcccggagaatctcgggctggagcgcgggctcatcggcgagcgcatcgttgattcattgcaggccgtggggttggcgaacttgcgtcagtccgacccgacccgtatgagcggcggacagcagcagcgcgccgccatcgccggcatgctggccatgaacccggcgatgctggtattggacgaaccgaccgccatgctggacgaatccgcacgcgccgaagttatgcgcattttggatgatttgcaggcgcgcggcaccactattgtgcatgtcacgcatcatccggatgagaccgttcatgccgatcgcatcgtgcacatggaggccgggcgaatcgttggtgtcactgcagccgccgataatcgacccccgctagcggaggctgtctcgcaaagcgagaccgagggtggtatcggcacagaagccgcccccagtcgtcctacgaacgacagcccccgccagcggaagcgcgaagacggctccgaactgccgctgctctccgacggcatcggtgatatgacgaaccccattattcgcgtctcgcatctgacctatcgctatccttcggccaaacgggcggttatcgatgacctgtcgttcaccatcgcgcgcggtgaaaccgtggcactgatgggcgtgaacggttcgggcaagtcgacgctggtgcgcatgctgtgcgcgctggccgcgccgaccgccggcagcatcgaggtggccggcgttccggtggcctcgaccggcaaacgcggtcgcaacgcgcgtccgaagccggcgaatcgcaggcaattggcgcaattgcgccggcatgtgggttacgtgatgcagcatccggagcatcagctgttcgctgacacggtggccgaggacgtggcgtacggcccgcgcaaccaggggctcgccgaggccgaggtggccgaccgtgtgcgcgaatcactggacctgctgcatatcgggcatcttgccgaccgctcccctttcgacctgtccggcggacagcagcgattggtggccatcgccggcgtgctggcctgcaatcctgacgtgctcatcatggacgagccgaccgcgagcctggacgtccaggccaaggagcgcatccatgagctgttgcgcacgctcaaatcgcgcggcgtgaccgtgctcatcatcacccatgaccgagcggaggccaagcatatcgccgatcgcgtggtacgtatgccgattgccggcgcggctggtgctgagagcatctcggcaaccgagactgccttccccgccgagtccgtctcccctgacaaacccgcgcactcggtgatccaccgacttgacccgcgcgtgaagatggtgggcttcctggccgtcatgttcacgatgttcgcggtgaacacacccctccagcttgcgctgggcatcgccatcaccctggccgttatcgcggcggcacgcctgaacccgttacgggtgctcgaatccattcatccgattctgattctgctggtgctgatgggcgtggtcaatctgtttgtggtgcgcaccggcacgccggtggtggcgctgggcccgctgagcatcaccgatcagggcgtggccatagccgtgctgtacgcctgccgtttcgcgttggtgatcatcttgggcgcggtgttcctcaccaccaccacgccgaccgccatgaccgacgccttcgccaccctgatcagcccgctcaaccggctcggcatccacgcccaggagatcgcgttggtcatgagtctggcattgcgattcattccaacgctgaccgacgagacccgtgccatcgtcgatgcccaatccgcgcgtggcggttccatcgaaaccggttcgctggcccagcgtatcaaggcgatgagcgcgattatcgtgccgattttcgccggcacgttgcgtcacgcggacaacctgagcctcgcacttgacgcccgctgctacgaggagagcatccgccgcacccactggcgtgccctgaccatcgccgcgcaagatctcgtgttcgccgtcgccgtcatcgcctacatcgccgccatcatcgcgctgtagggcggcaaacagcacagacagcaccggttgctatgctggtgtggttatacgaaagatgtaaggaaattcccatggcattgaccaagaagcaaatcaagcagctgcgcgcgatggcaaactcgctgaagcccctgttctatgtgggcaagaacgatttgaccgagtcggccgtcaatcaggccgatgaaaccattgagaagcacgagctcatcaagtgcgccgtgcaggacggttctggcctgaccgccaaggaagccgccgccgagcttgccgagcagctgaacgccgaagtggtgcagtccatcggcaatcgtttcgtgctgttccgtcgctcccggcgcgacgatgtggagcatatccgcttggtgcgcgagtagcgttcgctctgctcgatcccgtagcttgatatgagtaatggcggttggaatcagtccgattccaaccgccattattcatattcgcccagcgagcaccgtcactgatccaagatggacccgacgattcccgcaacaatggtcagaaccaaggaccccagtaccgaccaccagaaaccgtgtacgaagacgcccacgccgaacagactgaccgccagccagctggcgagtcgcatgaacagccaattgataatcaaggtgaccagcccgagagacagaatcgcaaacggcagtgcgatcagatgcacaatcggcttgattgacgcattaatcagcgccatgaacaaagcgaacgcggcgatgccgagaatcggaggctcccccaccggggtcatgccgggagtcaccgcgaccatgacggcgacggcgatagtcataatcaaccagctggtcaggaaacttttcatggcccaatcgtagcgcggcaggttttactattaggcaaaacgtgagatgatgttgtgcagaaacggtaagaaggtactgccgttcccgattgagaagggatagacccacatgactgataatcaacaacaaccgtacggttcggacagtgttccgcagccggcacaacctgcacagccggcacagccgtcgtacggccaagatgccgcacggcagccgcagggctatggcgccccacagcccgccgcatacgctcaacccgccgccggaaccagcagcagccgcaatacggccagcccgccggcgcatacgctcagtctcagtacactcagtctcagtacgctcagccgcagtatggccagccgcagtatggccagcccgcacagcccgcagcgggctacggccagcagcccggctatggacaggcctaccagcagccgaatgcctacgcacagccgcaatacaccgccgctccgtatgccgccgccccggtgtggcaatcatccaagtccaagttggctgccggcctgttgggcatcttcctcggcggacttggtgtgcacaacttctatctcggcaacaccggcaaggccgtggcccagctgctgctgacgcttgtcggctggattctgctcggacttggcccaatcgcagccgccatctggggctttgttgaaggcatcatcattctgtgcagcaagcccggctcgccgtggcataaagacgccaacggctacgaactatcagactgagactgacctcgggccacgttcattgggcctctgatcaaccacgcctctgcaggtatcatctcgatgccgcagcctccgtgggatgcgacacgccggccgtgtacatgagttcatgtacacccgatacaggcgaatcagtatcgcacgagattcaacagttcctgctgtttggcatagcgggaaacgttggtcagggcgatgcggatgatgtgttcggaagtcttttccaaatgattgccgccggccacatgcggggtgatcaggcaatgcggctcatcccacaacggactttccgccggcaacggctcaggctcagtgacgtccaatccggcaccgtggagccgtccattgtgcaaggcgtcggccaaggcctcgggatcgatggcgtcgccacgcccggcattgatcacgatggctgtggatttcagacgccccagacgatccgcattcagcagatgatgggtctgcggcgagcgcggcaccgccatcgccaccacgtccgccaatggcagcagtgcttccagccgctcgaagccatacatcttttcaatgcccttggccggcacgtccgcatgacggcgcacgccgaaggtacgcatacctacggattgggcaagctgagcgaaatgcgacccgatgtcgccgacgccgataatcagtgcgatgccaccttccgggctcaataccgggccttcatcctgccactgatgatcacgctgattggaggcataccggttgaggttcttcatcaatgcccacatggtggcgaacatgtgttccgacacgctttggccatacgcgccgctcgcattggtgaccatggtgccgcaaggcagcacacccgggcggatgtacgcatccacaccggcgctgaaggtctgcaaccattcaagacgggtgtattgggaagcctgcgagaccggaaagttgccgatgactgcggtggctcgggagcgaagctcctcgggaacagcggccgaccataccatgtcgccgcggtgcgcttcgtcgcccacgaattcctgcggcacatcgcgggccgccttggcgaaagcgcgccgttctccttcgttgagtggcaggcagttgacaatcagcttatgcgtgttctcaatacccatggttcaccaaactaggcggcagggcggatattatcgcgtgtttcctcatgctgaaccaatgccgaacccgccccgccgaaccaatgccgaacccgccccatcaaaccccaccaaaccaagggacagcccattgcgcatcgaccgtagcgtccgccccgaaccgtacactcacaggtggttttgtgattccatagcgtgcagccaaggcagtacgattgccggtttatccgcacgcacaggtacctacgccggttggtaaaccttacattccatacattgcaaccgaacgtttaggagcatgtatgcctgagcagcatattgataacgagaagattcccacacgtcttatcggcgcgattgtggctgtcggctcacttgccttcattggcattctgaccgaaaccgtgatgaccgtgcttttccccgcactgatgcgcgaattccatgtcgacacggccactgtgcaatggattaccacgatttatctgttggcggtggccgccaccatgcccatcagctcgtttttgaagcgccgattcgcactgaaaaccatttttcttgcggctgtgattctggccatcgttggctcgctgatcatgatcgtcgcccaagccttcccgctgctgattgtcgcccgcattattcagggcattggctcaggcgtggccacgccgttgatgatcaacatcattctggagcagtctcctcgttcgaaaatcggccgattgatgggcgtaggatcgctggtcattaccgtggctccggccatcggcccgaccgtcggcggcgcggtgaccacagtgctgccgtggcgcgcgattttcgtcatcgccattccgctggtgctaatcgcagcatgcatcggcatgaagtgcattgagcagaagacaccgaccgaggctgcctatcttgacccgattcagcttgggtccattgttgtcgcgttggtcggtctggtgctggcgctcaaccaaggtggcgtggccatcagtgcggcggtgtccggcaagtcagccacacgctccggcattatcgccattgtcagtctgattgtgggcctcgccttgttgatcgtgttcgccatgagttccaagcgtgccttctccccgctgctgcgccttggcattctcaaggatcccgccgtactgttacacgcctgcgcatatctgctgctgccattggtcgccatcggctacggctatgtcatcaccaatgtggcacagctctcgctcggcaccacggcatttgtggccggctctctggtgctgcccggagcactggtcggcgctgtctgtgccccgcttggcggctggttctacgataagttcggcgcggtcaagccgattctgattccgatcggcatcgctattttgggcccagtgcttatgctggtgttctcgatgcagcttacgcccgtgctgctcgccggattctatttcattttcggtctgttctattccatcggcaatgcgaatgtgatgaccagtggcctgtcggaggtctctcccgagttcaagccggacggcaacgccattttcaacacgtgtcttcagtttggcggcgctgccggtaccgcactgttctccacgattctttccgtggctcaggccggcgcaggagaagaaggcaccgctgagtttgctcacgccactgccgtcggcggcacatggacgtttgccacgatgacggttatctgcctgattggctggtgctgtctggccaccgcgttccgcattcgcgcggcacgtaagcgtgcataaatccgatcatcaatagagtcccagctttccaaacacgtgtggggcgtggcccggggg

SEQ ID NO: 3097 - DNA, 6317 bp, Unknown
  R215_18m  MAG No. k141_2349
actcgctcggtgccgccgatgatgaaggtgccgtgcggggtctgcagcgggaagtcgcccatgaacacggtctgggacttgatctcgccggtgtcgccgttctcgaattcggcgttcacgtacagcggtgcggagtaagtgtaatccttctccttgcactcctgcacggtgtggcgcggctcctcgaagtacgggtccgagaaggtcagggacatggtctgtgcaaagttctcgatcggggagatctcgttgaagacctcgtcgagaccggaggtgtgggccacggtgttggtgccgttagcctcatcctcttcgacacgcttcttccagcggtcggaaccgatcagccaatcgaagctgtcggtctgtacgcccagcaggtagggcacatcgatgggttccttgatggaaccgaagttcacgcgatccgacgccttgtgcagatcaatgtcatgctggtcggcgcgtgcgatgatggtggtggtgttcgtcgtagactcagtagccaatggacgttccttatcgctcgctaatatgtggtaattcccctgggagcgccggcatggccaccatatgcctatgcggacgcttcattgtcgacggcatgcccgcaatatgacacacctcatgcaaagtcaaaagaatactgatatgcgaggacatttttagctcccgctgacgagggagctgtcgagcggagcgagactgagggagagacccagcgtccaaacaccaaccgcaggtcctaccccaccgtaaacgtcaccggatcgctcttcaccttcggatgatccttcaaactcagctgcgccacgtacgttcccgcattgaccttggcccaatccgactcatccgtgcattcggtgagcgtggcgttcgcatcggtattccacgtgaccttctgaacgtccttatcacccttggacatcagcagcagacgtgaatccgccggacacacatcggacttgtaaatcgtttcctgaccggaagtaatggtgagcacacggccggaatcggccccgtccaccaaacagttgcctgacccctcgtgcacgatggtcgcggtgaaatcaagcgatcctcctaccggcacggattgggaggccgcggaaagctgcaatgtcacatcactggccgagcaatccttgacgttgctgactttcttcggagccggcgtggcgtcgcgggaaatcgcatacacctcgtcatggtgaatcatcgtgttcacggcaccgataccccggccaaggctgtacacgcagaatacaatcagcgcgattatcagcagcaacaccgtgccggccacgatacgccgacgacgatagatggcctgctgctttttgctgatcctgcgcttgcgcggcttgccggaacggtcgtttcgggcgggcccgccggatggcccattggccccggtgccggctccgcgtgccgttctcgcgcctgatgtgttcctctgcactgccataacccttccagtctacggtcaccacacccatacacgcttggggaacccgccattttcacaatgtcagctgggtaatcgcaggccgccgtccagaatctcgatcaggccgtcatcgtcaaggctggcgatgcaggcggcaagctgaatctggtccttccaaagcttgtcggcatcttccctgggcaacgtgactccagcgggaagctcgcgcagcgcggcgagcaccagaccgcgcacctgtcgatccgtgccttggaatcgttggcgtgggcgggtgcgacgctcccccagtccggggcggccggctttgagaaatgcacaatcatccgcaatcgggcaaatctcgcataacggcgtcttggctgtgcaaaccaccgcgcccaattccatcaccgactggttccatgtgaccgatgggcgttcgccacgatgcagtcgggagcgtttgccgccacggatagtgccgttcacggtatgttcggcgctaccggcattatcggcgacgtcagcatcgcgcccgagaatctcgtctttgggcagcatgcggttcgccagcgcgcgttcggccgggctggccgctcccccgcgcgattcgacgccaaggaatacacggctcagcacgcggcggatgttggtatcgatcacggcgattcgttcgccgaacgcaaagctcagcaccgcggaggcggtgtaatcgccgatgccgggcaatgcagtgagttcgtcatacgtacgcggcagtttgtcggcgtactgctcggccaccacgcgggcacattcctgcaagcgcaatgcacggcgtggatagccgagccgaccccatgcggtgatcacctcggccttgggggcctcggcgagtgagcgggcgtcaggccagcgtgccatccaatcgttccaatacggcaccacacgactcatctgcgtctgctggctcatcacctcactgaccagcacgccccacggcgtggcccgtccgaagcgccatggcaagtcacgcgcattggcctcccaccatgcgccgagccgtaaagaaattgctgtgtcgttcatcgttcttattcttagcagctatgacgaacgaggcaaaacacaacccccagagcacaccgaatccagccaatcccgaaaccaaagtcgagaaaatgttcgaatacggctatcgcaagtcgaattacgggccggacgagctggtgaccgacgcacacggcaaccccatctccgtggtggacgcgatgctttccgccgagaaggccgccgccaccgaaaccgtgacgccgcacctgtgctattactcgccgcgtattcccggcaacaccggttcggccatccgcctgtgcgcagtgaccggcacgattctgcatttggtggagccgttgggcttcaacctgcgcgacaccaagctgcgccgagcaggcctcgactaccacgacatggcccacgtggtgctgcacccgaatttcgacaacctggtggagtccatgcccaattcgcgcatcatcgcgttcaccgcgcacgccaccaagctctacaccgaggtggaatacaagccgactgacatcctgctgttcggccccgagcccggcgacatccccgacccgatggacatcatggagggccctcatgtggccgaacaagtgcggctgcccatgcgcccgtccctgcgttccctgaacctcaccaactgcgcatccatcgccatctacgaagcctggcgccagctcaattttgcgggcggagcgtgaggagaaggcccggtgggccttcgagtagcgacgccgaacgaacgccgacaggcgcgagagcggaaacactgagcttcgcgcagtgatgaacgctgaatataaggctacctgcgtttcgaggggcggatttggcatccgccggaggtctactgccgcttcaaggggctgtcaaaggacgagaccccgagtatggccgttgaaatatcaatgcttgtactcggggtcttcatatataccagcccctcgaaacggaagtagacctccagaaaggtcggaatcagcccctcgaaacgggaatagacctccagaaaggtaattcgagctggtatctgccttcaaagaggtacattcgagcgtttgcagaatgctatctgccttcaaagaggtaccgcaatcgagaaaccccgggtatgagtgttgatattccaacgctcatacccggggtttccgcatataggtacctctttgaaagcagatagctctccgcgaggggccaaatgtacctctctgaaagcagataccctaccgaatcaattcttgaagctgtgaatcggcgcagggattcggccgccacgggtcacgaaggcctcgcagctggtctggttgaccggcatgatgggcgcgtagcccataaggccgccgaagttcgccatttcgccgacgcccttgcccgccacggggatcacgcgcacggcggtggtcttctggttgaccataccgatggcggcctcgtcggcgatgatgccggaaatggtggctgcggtggtgtctcccggaatggcaatcatgtcgaggccgacggagcacacgcaggtcatggcctcaagcttttcgatcttcaggcagccattggtcgccgcgtcgatcatgttcttgtcttcggagaccgggatgaacgcaccagacaggccacccacgtagctggaggccatgatgccgcccttcttgacttggtcgttgagcatggcgagcgccgcggtagtgcccggtgcgccaacctgttcgaggccgatcttctcaagcacttcgccgacggagtcgcctacggccggggtcggcgcgagggaaaggtcgatgatgccgaatggaatgccaaggcgacgggatgcctcctgtgccaccagctggccgacgcgcgtgatcttgaacgcggtgcgcttgatggtttcgcacaggaactcgaaatccttgcccttggccgcatccaatgcgcgggagacgacacccggaccggaaacgcccacgttgatcacggcgtcgccctcggtgacgccgtggaagccgccggccatgaacgggttgtcgtcaggcacgttgcagaaggccacgaacttgacgcagccgtaggagtcgttgtcggcggtgcgctcggcaacgtccttgatgatgtggccgagcagttcgaccgcgttcatgtcgatgccggtcttggtggagccgacgttcacggacgagcagacgatgtcggtctcggaaagggcttgcggcagggagcggatgagcaactcctcggccggggtcatggacttggagacgagtgcggagtagccgccgatcaggtcgacgccgacctccttggccgccttgtcaagcgcgtgggcgatcttgacgaagtcctcgctcgtcttgcaggagctggcaccgaccagcgagatcggggtgacggtgatgcgcttgttgacgatcgggatgccgtagtcgcgttcgatggccttgccggtggaaacgaggtccttggcataggtagtgatcttgcggtagatgttgtcgcaggtcttgtcgacgtcgtccgaggcgcagtcgagcaacgagatgcccatggtgatggtgcggacgtcgagcttctcctgctcgatcatctgattggtctcgtggacctccatgatgttcagcatggtttgttccttacaggatatttgaagactaatttggcggtcaccctcatcagagggataaggatggctccgtcagcggaaagcccaccgggctttccgcctcctcgcgtgcggcggcctgctgagcgggccgcctcaaatacggtgcatcttggtgaagatttcctcacgctggcagcggatgcgcacaccgatgtcgtcgccgaggtcctcaaggttgccgaccatcgcgccgaagtccttgtccgcgttggcgtagtcgacaatcatcatcatgttgaagtaaccgtcgatgatggtctgggaaatgtcaagcacgttgacctgatgttcggaaaggtatgtgcagacgcgtgcgatgatgccgacagtatcctgaccgacgacggtgatgattgccttgttcatggaactccctaaacgtgaggtgtgaatatccagttaccgtcttggcgaattgccggacgtgccctcaagtatagggaaggcacgtgccaaaacacgtgcctttcgtctgttttgccttacatactgagaggactgccggttaccacctaccgctgcagcaactgtatgtcaccgccagatgccgtcaagcacacgcacatccacgcaatcgaccttgccatcagcaacaaaacggaactcgccatcgccgtccgcaccttggaacagcatactgccggccgcttcgccgttgttaaggaagacttccaccacattacggtcgaagaagatttcgacgcgacgcacatcggcgatgccgctatcgaaatcgatgtcgtccacgactgttcccttcgtgaccagtcgggtcacgccgtcgcgacgctgcagctgcaattccatcgaattaccattggcggaattggtaccagtcgcgatgagcattgtgaaatcgtcatcgtcagccagatgcatgtccgtgtaatacgcgttgttcggcacaataaagaaggtcccgttttcgtctgcatgcgcttccaaacgatcgcctagcagctgctcgtacacttccttgacaggacggctggtcaagcggccgtcacgcacgtgcagttcacgtggcagcgacatcatgccgttggcaatgcacggcttttccacacgcatcgcgggaaagtcggtataccagccgaacacgatacgacgcccgtcgtcggcaaagctttgcgtggcatagtagccggtaccgaaatcacaccaatcact

SEQ ID NO: 3098 - DNA, 53453 bp, Unknown
  R215_18m  MAG No. k141_3498
atgcatacacagatgctcgacgctgaaatccaattcaatatggcgagcgatcccgcagccgatcgcaccggtggcatcctgccttattcacggctgacgcatatgaccattcaggcatggtgcccattccaatccggcacggaatacggtccgttcgtcggcaacgagcatttccccgagctgaacgccgaattgacccgtcttgccggcaatccgttggtgtgagcgagagatgacgagaccaaggccgttgaggcgcgtgttcagcgtgcatacatctcaacggcggtcaatgctgtgtcaatgccaacattcagtgcctccgggcgtgcaccatctggcgaaagctgatgcgtatgaccatacagcagtttgcgaccttcaaacggcaacgccttgccgctgaacttcgccacatcatcgggccaactgtatgccagatcctcccgatacgggtaatgcgaaagattgaccgtaccgagtccctcaatctcaaccgtatcgtgcggctccaaactttcgaacaggttaagtgcggggcggtcttcccgccaccagtcatcatggttgccgatcacaccatgcagatgcttgcaattgagcgctcgcaggcagttcttcagatgggtcagcgatgtgcggaaaccgatatcacccagaatccacagctcgtcatccgggccgaccacagcgttgatatgatccacaatcgccttgtcatgcgcatccgtatcggcgacctgacgaaatgtcagccccgcgccgaacgtctcctccttggcccaatcctcggcggtcttgcgatcatgcgcgcgcagcacctcctcatagcgtgagcgcgtcggatcgaacgtcgtgaaccctcgcaacaccgtgaccagcggatgcccgaaatgcgtgtcggtcgtgaaatacctcatgacagtcgcctcccctttccggcgtgcagcaatcatttcccatcctaggcgcagccggcacctgtcggttcgtgttgccataatgaggcgcattgcaggggaacccgtgaacgcaagctgccggtcatcgtggcggcgaacgggttgagaaaggcgctgtgcctgacccttggaacctgttggccaaacaccatcgaagggagcaaacgatgtcttttgacgccgccgcattcggtccgatcaccctgaaccacctgccgccgttcgcccagcgcctacgacatgcagtacacgtggaaacccgaatgggatgtgtgaggagttcgatggatgagcggtgggcgcgtgctttgcgcgccaaaggcattgatattgacgaggctgaaggtgctggtgagaaacgggcgcacgacggcaaacggcataccagcatcacgggtactggtcgacgctccgagtcccagccggctgccgggctccgcggtcgatccaataccagtacgaatctgccggggccgaaggtgacggcacgcgccacgccattcaaggccaccggtcataagggcggcatcagccggcaggggaattgagctgatccgcagaaccatcgcgcgatgaatgggcgtggccaacgccattccgccattgttgagccgcttctacttggaccggtacctctttgaacggagatattccatattgaagctattccggcatcatatggcacgtaggaaatcccggatatcggcgatttccttatcacagatggcatgggccatgccggaatactcgcgataggtcagatgcccggcccgttcaaggacctgatgggccgtttgctggtcgggcatcggaatcgtgcggtcctgcgcgccatacgccaggaagaatcgggtaggggagtcaagcgccgcctgttcctcgcccatgaacgaaggactgagcaggatcgcggcattgaacaacgtcggatgcgccttgaccagacgatacgacagataaccgccttgggagaaaccgatcaatatcttcctgcgatgggcgaatgccgaggcatccagcagtgaagccaccgcatccccgaccgccgcgcattcgcgttggcgctcgtccacgccgcagccgtcgggataccagtagttgccgcccatatagggcctcgcgtaggtggcacggaacgagatatagctgggtacggcggcaattgcggacggggccgcatcggctcgcgtcggcgcatatacggcgtcgagaatccgcaccatctcgctttcgtcgttgccgtaaccgtggaacatcagggaaatggggtcattgccgccggcatcgatctggcttgtcatctgcattcgcatcgtcatcacctcaccaacgagcttacatgcattagacttgtagcgattgacccaccgagcacgcaaggagcaagttatggagccgaggcgcgggcctctcaccgcaggcgagaaggtgcagttcaccgaccgcaagggcaagaagatcaccgatcagcttgtggctggcggctccacgcagaccgagcatggcctgattctgcatgacgatgtgatcggcaagaccgaaggcaccgtgatcctcaccgtgcacgccaagcgtgaggcgcaggtcaaccaggtttatcccgagaaagacaagaacaagccgtggaagtcgtcgcgcgccatcggcggctgggagtatgcggtgatgcgcccgcgactggccgattatgtgctttcgatgccgcgcggcgcgcagatcatgtatccgaaggacatcgcccaggtcattcagctcggcgacatccgctccggcatgcgcgtgcttgagtccggtgccggctcgggcgcgatgagcgtgaatctgctggacgccgtgggcgagcgcggccatctgaccacgatcgagctgcgccccgaattcgccaaagtggctcaggccaacgccacgctgtattacggtgaagcccccagctggtgggatctcaaaaccggcgacttcgactccgtggccgccgaactgcccgaacactggttcgaccgtatcatgctcgacatgctcgacccgtggaacagactcgagcaggcataccgcgtgattgcccccggcggcgtgttggtcagttacgtaactaccaccacgcagatgagtcgactggccgaagccctgcgcgcggccggttgctggaccgagccgcagatccaggaatcgttcgaacgcacatggaaggcccaaggcctcgccgtacgccccgaccaccagatgatcggccataccggtttccttgttatctcgcgcgccatggcctccggattcgaggcgctcagaaagcgcgatcgcgtgaccaaggacacgcagaccgacatcgactcgctcaccgacgaacagcgtgaggcgcagatcgaggaactggaactgcgcgacatctccgaccacaaactacgtaaggtgttgcgcgacctcgaccgtcaggtgggagaactcggcaacacgcatgaataaccgcccgacgatgagtttgtgaacgctcacacacctctatactggaagcaacaccacaccgccacaccgggcagacggttcgtgaagggagccacggatgggcatcaagctgagcaaagtcgccaaagcagcgaaaaaatacgaccatatcctcatcatcatgaggcatgccaaggccgagccgttcggcgacaagggtgactcggagcgcgagctcaccgacaaaggtctgaaacaggcgaaggccgtgggcaagggcatcgagtcgctgggactggtgcccgaccagatctcctgctcgtccgccacccgcacgcgccagacactggaccgcatgctcaagacctttggcgacaagccgatcgtcgactaccgcatcagcctgtatgacgggggagtgcaggcggtgttcgacgagctcgcccacgtcaaggccaagaaccgcgtgttcatgatagtgggccacgagccgactgtgtcgatcagcgcccaatggctcgcctccgccgactccgacggcgaacgactcgacctgctcaacttgggactttcgcccgcatccatcgtgatcatgggatcgaacaaaccgttcgacgaatggcaggtgcacagcggcgaactgctcgcggtcatcaatgtgaaagacttcgactaaagcggatataaattccatctataacgacactctgcggccatttataaggggtggaatccggatgttttgctaccctaagtcgggttacgaacgcatacattggaggattcatgtccactctgacttccgtctccggcttcccccgcatcgggcagaaccgcgaactgaagaagatcatcgaaggctactggaagggtgccaacgacctcgccgccgttaaggccaccgccgccgaactgcgcgccaagcactggaagctgcagcaggccgccggcatcggcctcatccccagcaacgacttcagctactacgatcagatgctggacaccgccatcctcctcaacgtgattccgaagcgttacgagcgtctcgccttcgataaccaggaggacacgctcttcgccatggcccgcggctaccagggcgacaagggcgacgtgaccgccctgccgatgaagaagtggttcaccaccaactaccactatctggtgcccgaagtcgagtcggccgcggagatcaagctcaactccaccaagccgttcgacgagttcaacgaggccaaggcgctgggcatcgacaccaagcccgtgttcatcggcccgtacacgttcctgaagctcgcccgcaccccggaagccaccgaactcgagctcgacaagggcctggtcaacgccgtggccgccgtctacgccgaagtgctcgacaagttcaacgaactcggcgccgcatgggtacagctcgatgagccgtacctcgtgctcgacaaggagccgggcgatgtggagctcttcaagaccctgtacaccaagatcctgtccgccaagggcaacgtcaaggtgctgctcaacacctacttcggccacatcgccgacgtgtacgagaccgtcaacctgctcggcttcgacggcatcggactggacctcaacgaaggccgtgaagagaacctcgaagccgtcgccaagtatggcgtggcctccaacaccgccatcttcgccggcgtgatcaacggccgcaacatctggcgcaacaactacgccacctccctcggcctggtcgacgccctgaagcaggtcaccgccaacgtggccgtctccaccgcatcctccctgctgcacgtgccgttcagcactgaaggcgagaccggcatctcgtccgaagacctcaagcacttcgcgttcgccgtggaaaagctgaccgagctcaaggaagtcgccgctctggccgacgccaccgaggacgagaagaaggcatccgccgccctcgccgccaaccaggccctgttcgacggcacccgcgtggccgccgacccggccgtcgccgagcgcatcggcaagctgtccgacgccgactatgtgcgccagcctgcccgcgaggagcgtcaggccctgcagcgcgaggccctcggcctgccgctgctgccgaccaccaccatcggctccttcccccagaccaaggagattcgcgccgagcgcgccaagctgcgcaagggcgaggtcaccaaggaagcctacgacgagttcatcaaggcccagatcgacgccgtcatcaagaagcaggaggagatcggcctcgacgtgctggtccacggcgagttcgagcgtaacgacatggtcgaatacttcggccagaacctcaacggcttcctgttcaccaagaacgcttgggttcagtcctacggcacccgttgcgtcaagcctccgatcgtttggggtgacgtgtcccgcgccaacccgatcaccgtggaatggtctgcgtacgcccagtccaagaccgaccacgtgatgaagggcatgctcaccggcccggtgaccatcctcaactggtcctggccgcgcgaggacatcacccacgaggagcagaccaagcagctcgccctcgccatccgcgacgaagtgctcgatctcgaggccgtcggcatcaaggtcatccagatcgatgaggccgccctgcgtgagaagctgccgctgcgcaagtccgactggcacgtcaagtacctcgactgggccgttccggccttccgtctggtgcactccgccgtcaagccgaccacccagatccacacccacatgtgctactccgagttcaacgacatcatccgcgacatcgacgcgatggatgctgacgtgatctccttcgaagcctcccgtggcgatctggtggtgctcgacgccattcatgacgcgcacttcgagaccgaggccggcccgggcgtctacgacatccactccccgcgtattccttccgagaaggaaatcgaggatcgtatctacgagatccttgacaagatggacgtcaagaaggtgtggatcaaccccgactgcggtctgaagacccgtggtaacgccgagacctggccgagcctggagaacctggtcgccgccgccaaggccgtgcgcgccaagctcgacaagtagcggaaatcaccgagctccctctgtatgagggagctcgggtttatgtaaggaaatcagcatgcattccccgatgttcacccttgaggtctttcccccgaagcgcaacgctcccgtggacaccatctatgacaccctcgacggcctggaggggctgaaccccgacttcatttccgtgacctacggccacggcacccattcggatcgcaccgccaccgcgcgcattgctcatacgatcagcaaggagtacggcattcccgcagtcgcgcatctgaccgcgttgtattccgacaaggcgaaaatcgacgaggccctcgacatgttcgagcaggccggcgtgagcgccgtactcgcattgcgcggcgactacatcgacggcgagcagctggtaggcgagttcaaccacgccagcgacctcgtgtcatacatccgctccgtgaagccgggcctcaaagtgttcggcgcctgctacccggaaggccactaccaggctgactcgctggaccaggacatcgaaaaccttaagatcaaggtcgatgccggcgtcactcacctgatctcccaactgttctacgacaacgaggacttctatcgcttcctcgacaaggcgcgcgccgccggcatcaccgtgccgatcgaggcgggcatcatgccggtgcgtggtgccaagtccgtgcgtcgcatggccgaacgcaacgcctcgcgtatcccggacaagctcaacaccctgctgaacaagtgggaggacgacatccagtccctgcgtgccgccggcatcctctacgcttccgagcagatcgccgacctcgtggcccacggcgtggacggcgtccacctgtattcgatgaaccaccccgccaccacgcgccgtatctggcgcaatgcggaaccgttgttcctcggtacgtaaggttgacgcatatcgcagcgcggcgcatctcaatgcgtcgcgccgcacgttaatctgctggcgaaacccagagttcccccagcggccgatggatatcatgaacgtacaagccaaccaaagcgatggaaggaagtccgttatgtgcactggtgtccgtttctccgatgatgagggcaacacctatttcggccgtaatctcgactggagtttctcatatggggagaccatcctggtcactccgcgcggctaccgctatgacacggtgttcggtgcgggcggcaaagcgaagccgaacgcggtgatcggcgtgggcgtggtcatggccgataggccgatgtatttcgactgcgccaatgaacatggtctggccatcgccggcttgaatttccccggctacgcctcgttcgtccacgaaccggtcgaaggcacggaaaacgtcgccacgttcgaatttccgctgtgggtggcgcgtaatttcgactccgtcgacgaggtcgagaaggcgctcaggaacgtgacgctcgtctcccagatcgtgccgggacagcaggagtctctgctgcactggttcatcggcgacggcaagcgcagcatcgtcgtcgagcagatggccgatggcatgcacgtgcatcatgatgacgttgatgtgctgaccaatcagccgacgttcgacttccatatggaaaatctgcgcaactacatgtgcgtcagcaacgagatggccgaaccgacttcatggggcaaggcctccttgaccgcctggggtgcgggtgtgggcatgcatggcatcccgggcgacgtgagttccccatcgcgcttcgttcgtgtggcctacaccaacgcgcattacccgcagcagaacgatgaagccgccaatgtgtctcgcctgttccacaccctcggctccgtgcagatggtggacggcatggcgaagatgggcgacggccagttcgaacgcacgctgttcaccagcggatattcgtccaagaccaacacctattacatgaacacctatgatgaccccgccatccgttcctacgccatggccgattacgatatggattcctcggagctcatcagcgtcgcccgatgactccttcccggctcatgccccattcggagggcatgagcgtatatagtggaatcttatggaatcgtcgatgttcaaacccagctccatggatctcatcagggcaggtctgcaagacctcgacaaggcccgcaccttgttcgaccagctcaagacggacgacattcccgatgagcgatgcgccgaactgctgagcatgctggcccacgcctgcgaccccgatatggcattgagcaatttcgtggatatcgtcaacgcgatgcaatccagccagcgcgatctgaaacacgtcatccccgacaacgacgccctgaagcgtctggtcacggtgctcggcgtctccgacgcgatgggcaagttcatgcgcttcaagccgcagcttgtggaggccgcagcagtcgacaactgcaacagccatctgttcaatcacgcgcaacgccgtgcacgtctgctcaaggcggtcggcgcggacccggacgaaccggccatgcccgtcgcctccaaggatctggccgaagcggccacggccttgcgttccagctaccggaaccaactggccgccatcatcgcccaggatgccgtggcggacgacccggcctccatccaaccgaccatcagccgcgaactgtccgacctcgcggacgcggcgctcgaaggcgcgctggccatcgcccgccacgaaaccgagggcagcgagcacgtgcgcttcaccatcatcggcatgggcaaactcggcgcacaggaactgaactacgtctccgacgtggacctcatctacgtggtcgaaccggccgacaaggacgtggaccatcagacgctgatccgcgtgggcaccaagatgggcaccatgctgcagcgtgtctgccagtccgccatcatgggcgtggccgagcagccgctgtggcagatcgacggcggcctgcgcccggaaggcaaggacggcgcgctggtgcgcgtgctctcctcgcacaagaactactacgagcagtgggccgagaactgggagttccaggcgttgctcaaggcccgcccggtggctggcgaccccgacctcggccgggcctacatggatatgactcggccgttcgtgtggagcgcgtccaagcgtaagaacttcgtctacgactgccagaaaatgcgcaagcgcgtggaagatctgattcccgcacctctgaaggatcgcgaaatcaagctcggccgcggtggtctgcgcgatgtggaattcaccgtgcagatgcttcagcttgtgcacggccgtaccgatgaatcgctgcgcaccagcaacacgctcgactcgctgcagcgcctgtccgaaggcggctacgtctcgcgcaaacaggccgtgcgcatgtcccaggactaccgcttcgagcgcgtgatggagcatcgccagcagatctggtccctgaagcgcacgcacctgttcccggacctcggccgggcctcggtcggaggcctcgaaaagaagcgcgacatcgacgtggatgagctcaaccagaaccaggagctgcgtcgcctcgcccgcgcattcggcctgcacccggaagaactcgtcgacaaatacgacgacacccgtcgcgaagtacgccacctgcacctcgacatctactatcgcccgatgctgccggtcaacgcccagatggagaacgaccagatcgtgctgagcgtcgaggccgcacaggaacgattcgaatccatcggcttcggcgacccggacgccgccatccgccacgtgcaggcgctcactgccggcgtgggacgcgcggccaaaatcaaccgcatcatcctgcccgccgtcttgcagtggctgggcgagggccagaacccggacatgggcctgctcaactggcgcaagctggaggagaacttcggcaccgaatccggctacctcggcttcctgcgcgactccacctccgctgcccagcgtctgtgccacatcctgtccaactcgcgattcctgggcgacgcgctcaacaagtcggtcgaatcgatcagttggctcggtgatgacggcaatctgcaggcccgcacgcgcgaggcattggatgtgcagaccggctcggcgctggaacgtttcggctcgaacatcaacgagttcgccgcctccatgcgcgccatgcgccgccacgaaatcgaacgcatcggcctgtcttggatgagcggtgtgatcagcgactccgacagtctcaaggccatgaccgacgtgtatgacgcgatcatcgacgcctcactgacctgggccgtgcgccaccagatcgccgcgttcggcgtcgaaaccgcgccggccggcatcaccgtcatcgccatgggccgttacggcgggcgcgaagtgaacttcagctccgatgcggatgccattctcatctaccgtccggccgacgatgccgacgacggccaagccaacgccttcgccaagaaggtcgtggaagacctgcgcaacatcctgcaaggcccgacgacgctggaaccgaagatcgaactcgacctggacctgcgcccggaaggcaagaacggcccgctcgtgcgctcctacgcctcctgtgaggaatactacgaatcctgggcctcgacctgggagcgccaggcgctgctgcgcgcccggtacgcggccggcgacgccgaactggcgcgggacttcctgatcaacatcgccgacccgttgcgctacccgaccacggagctgaccgaggccgaattgcagaacatccgcaagctcaaggcccgtatggaggccgagcgtctgccgcgcggcgtgcgtcgagaacgtcatctgaagctcggcaagggcggtctgtctgacgtggaatggaccgtgcaactcatgcagctccagcacgccggcgatatcaaagatctgcgcgtcaacggcacattggaggcattggacgtgctggaggccaagaagctcatcagcgctatcgatgcgattcagctgcgcaaggcatggacgttgtgcaccgcggcccgcaacggcaactatctgtggagcgggcgcgccaaccaggccgatattctgcctgatgacatctattcgctgggcggcatcgccgtctacctcggctacggcgcccaccgcggccagcatttcgagaatggcctgctggccgtgatgcgcaaatgccgtgacgtatgccagcgcctgttctacgggcagaccgaagacgaggcgactgcggcaaccaccgccacggcctccgccgcaacgcagcagccgcaaaccgcgcctcgcccgcgtatgcacgtgatcgcaccgcgactggagcggaaccgacgccgcgcgcagcgatagacctttcttgtattgcgttcactacgttcattaggtcgattcatcgttcattaggtcggtccgccgccgcataccttgttggaatggcggcattccaacaacagatacgagggtgtagtgacctaatgaacgtcaaatcgacctaatgaatgagctctggcgttccaaagcagatatcagctatacagacacagcatattcgttggattttcaggtgaacactcggtgaatgcggctgtccgaaaaatggcgtaagttatattaggtcacacaagggtggccacctgaaaaccacgagcgaaaaggtgagccttgtctgaagaaacgccaatggtcggcaaaagcgtcgtaacgctggacggcctgtctacaaaccagattctcgacctgctgcataaggccgaatacatcgattcccaccgcaaagaggttgcccatacctgcgatgggcgagtgctggccacgctgttctacgagccctccacccgtacgcgcctgagctttgagacggcaatgctgcgtctcggcggcaaggtcatcggattcgccggcgcgcagctggcctccgtgaccaagggcgaatccatcgccgacacgttgaagaccgtgtccaactacgtggacgtggtcgccatccgtcacccgaaggagggtgccgcgctggtggcctcccgcgccgcatccgtgccggtgatcaacgccggcgacggcggccacatgcatcccacgcagacgctggccgacctggccacgctgcagtcgcgcttcggccgcatcaccgacctgaccgtgggactgtgcggcgatttgaccttcggccgcaccgtgcactccctgatcgagaccctgtgccgcttcggcaacgtgcgcttcgtgcttatcagcccggacgagctcaagaccccgcagtacgtgatcgaccgcatcaacgccaccgacaactgctcctacgtggaagtgcgcgacctggcctccgtgatcggcgacctcgacgtgctgtacatgacccgcgtgcagaaggaacgcttcttcaacgaagacgactacctgcgcctgcgcgacacctacattctcgacgaagaaaagctgcagctcgccaagccgtccatggccgtacttcacccgctgccgcgcgtcaacgaaatctccgtggacgtggacgacgacccgcgtgccgcctacttcgaacaggtcaagaacggcatgctcgtgcgcatggccctcgaaagcaccgtggtgggcgacgaactacccggatacgaaccgctcaaccccaaggaggttcaggcctgatggaagtcaccagcattcagaacggcatcatcatcgaccatgtgccggccggaacctcgctgaaggttctcgaatacctgaaaatcgacccggccaaaaccaagcttgcgctcatcatgaacgccaactccaagcgttacggctccaaggacatcatcaaaatcgaggatgacaaggacatcgacctcgacgtgctcggcttcgtggcctgccaggccaccgtagacgtggtgcgcggcggcaagatcgtcgaaaagaagcagccgaacctgcccgagcacatcgtcggcgtgatctcctgcgtgaacccgcgctgcgtgaccaccaccgagcccggcatcaagcagatgttccacctcgtgcactctgaacggctcgaataccgctgcgactactgcgacgaggaagccaaactgtgagcatcaccctacgcaacatcaaggtctggaacaccggcgaagtcatcgacctcgtggtgcccgggaccgctgccgcctacttcgccgacacctccgccgtggctgacggtgccgatatcgacgccaccggactgaccgtggcccccggtttcgaagacccgcacgtccacttccgcgatcccggccagacctacaaggaatctatggcctccggctgccgcgcgtccgcatccggcggatacacgaacgtgctcatcatgccgaacacgttgccggcactggatgggcagaccgtgtctgacctggaagcggccggtgcgaaagaggttctggatgccggcttcgacaacgtcatcgacttcctgcagcagtacgatactgtgcacgatgttcaattgccggttcgttacgatctgtgcgtgtgcgcgtccaaggatcgcgccggtcatgaggcaagcgacgttgccgactggctcaggtacgtgcccggattcgaggacgacgccaagacgccggccatgctcacgcaccccatcaccgcaattagcgacgacggttctgctgtgacgccggagatcctggaccaggtgctggagaacgtcaaggcctccgacctgtacctaatcgagcattgcgagcatcacgatacaggtgccgtgaacgaaggcccggtctcgcgcgaacttggcgtgcccggcattccggaagacaccgagctcaagatcgtggcccgcgatatagaagcggcccgccgcactggtgtccacgtacacttccaacatgtgagcactgccatctcgttcgaggcgattcgcaaggccaaggccgaaggattgccaatcacctgcgagaccgcgccgcactatctggcgttgagcgacgaggcgctgctcaagtacggcacgctcgccaagatgaatccgccgctgcgctccgaagcggaccgcaaagccaccatcgcggccatcgccgacggcaccgtggatctgctggccaccgaccatgcgccgcacacgttggcagagaaggaactcggcttccttgaggcacccaacggcattatcggactggaatgcgcgtacggcgtgtgccacaaggtgctcgtcgacggcggcttcatttccgatgagcgtctgatcgagctcatgtccgtgggacccgccgaactcatggggcatgtgccaaccgacgtggccgcgctggtcgaggactacgccgaacccgcgcccactggggatgatccggatggcgtgattgcgggggagagcgacgctcagccgcagcgtgaaggcgtcaaccgactgctcgacctgagccgcgtggatgacgccgacaatgtcgacctcgtggtgctcaacaccgctgaggaatggaccgtggaccctgaacagttccactccagggctcgtaacaccccgttcggcggctggcaggtcaccggacgccccctcgccacgatcatcggctcccagctgatgttcagccgtctgtagataacataaggagcagcatggatcgcctgatcgaagcgattgacaacactcagaaccccagcatcgtgggcctcgaccccaccgaggcgttggtaccgccgcaggtcgtggcgagctttgccgacgaggtgcgtgactcggtcgaatccccggaggaaatcgaatccgcgcagctggccgtcgcctacttcgaatacaaccgcacgatcatcgacgccatcgccgacatcgtgcccgccgtcaaaccgcagatcgccatgtacgaggcgctcggccccgccggcgtggacatctacacgatgacctgtgaatacgcggcccagcagggcctctacgtgctcggcgacatcaaacgcggcgacatcggctccactgcagccgcctacgcccaccacctgaacggcgtgggcgacttcgacccgtggcatgaggatgcggtgaccgtcaacccgtatctcggcaccgacggcatcaccccgttcgtcgaggccgccgccgaagccgacaaggacatcttcgtgctcgtgcgcacctccaacccgtcctccagcgaactgcagatgctcgacctggccgacggcacgaaggtctacgagcatgtggccgatctcgtggaaggctggggcgccgagaccatcggcagccacggctactcccgcgtgggcgcggtggtcggtgccacccaccccgaggaaggcaaggcgttgcgtgaacgtatgccgcacacgttcttcctcgtgccgggctacggtgcgcagggcggcacggccgcggacgtggcaggcatgttcgacaagcagggcagcggcgccatcgtcaactcgtcgcgcggcatcatcggcgcatggaagaagagcggcaagtactccgaatccatgaccgccgacgaggcgctggaccttgtggcgagcagcgcgcgccaggcggcgctcgacatgcgcgataatctgcgggttgccgtatataggtaggtagattgtccggctgtgggctatacgtgagtgtgggctggaaaccggagccgagtgtgtttaactacccctcagtcaacctgcggttgacagctcccctgatagggggggagcttgatgtgctgaataggaatgaaatgacaactttcacccccacccatgatgtggttgcggaggcgactgcggccggattcttcccgccgcgccacaacgtcgaaatcacgcaggttacggaactgaccgaccgcgtgatgcgactgacattccgcgacccgttcatcgcctcccacgccaagcccgcccagttcgtcaacctgttcacgcacgacgacttcatgctcatgccgcgtccgttcggcgtcagcgaagtcgacggcgatgaagtcagcgtgatcttcgccgtcgtgggccacggcaccgaacagttggcagggctgcaggccggcgacaccgtcgacgtactcggcccgctcggccgcggcttcaacctcaaggaagacgccaactacattctcgtcggcggcggactcggcgtgcccccgctaatctacgccgcgcaaaagctcgccgaacacgacgcctcctttgccaccgccgtattcggctaccgcaacgaccacttcgctgaggaatacgtctcccggtacgcggactggtcgtggagcatcgacgacgccgaaggcaacgtggtcgacctgctcaacaaactcgaacaaggcgacgacctgaaggcctacgatcgcaagccgatcatcttgtcctgcggaccgctgcctatgatgaaggccgtggccgcttgggccgccgaacgcggcatccccgcgcagctgagcatggaacagcgcatgggctgcggctacggcacctgcgtgctgtgcaccatcgacaccgtggacggccggctcaaggtctgctccgacggacccgtgttcactcgcgaacagctcggatggggggagtgacgatgagcgcaaacaaccagtccgcgcagggcagcgacaaccacatcaacctgtacgagccccacgtgtggaagcaccacaccaaggtggccggtctggaatggaagaacccggtcggcaccgcctccggcaccttccagtacgccgccgtccgctggttctacgacgtcagccagctcggcgccgtatgcaccaagggcgcctcgcccgtgccgtgggagggcaacccctcgccgcgcaccgccgaatcgccggccgcgaacatcaacgctgtgggcctgcagaaccccggcatcgaccattacttggccgaagacctgcccaagctcaaggccgcgggcgcgttcgtcatctccaatgtcgccggacattgcgatgacgattacgcggcggtcgtggaaaagctcgccgactccgacgcggacatgctggaaatcaacgtcagctgcccgaacgtttccgccggcggcatgagcgtgggcaccgacccggtggccctcgccaacctcatggacaggctgcgcccgatgaccgacaagccgatgatcgtcaaactcacgccgaacgtcaccgacatcaccgtgccggcgcgcgcggccgtggaacacggcgccgacgcgttgagcatgatcaacacgctcaaaggcatgcgcattaacattcgcaccggccagccgatcatcgccaacgtcaccggcggcgtatccggcccggccgtgctgccggtcggcctggcagccgtctatcgggtgcgcaccgcactgccggagattccgatcatcggactcggcggcatcgacagtggtgagaaggcgctcgaatacctgtacgccggcgcgaacgccgtcgaagtgggtgcggccgcgctcttcgacccggtggccccgctgcgcgtcgcccgcgaacttgacgacctgctggacagccgtcccgaactcgctgctaaactggccgcaggacagacttggaggtaaggaacatcatggcagaaacactcgcacatcgcttcactgaattcctgttggaatccaacgcgctgaagttcggcgacttcacgctgaagtccggccgcaagagcccgtacttcatcaacgccggcgccttcgacgacggcaagaagatcgccgcgctcggcacgttctacgccgaaaagattagccaggccatcgtgcacaacacgattccccgcaacatcgacaccgtgttcggccccgcctacaagggcattccgctggccgtgtccaccgcgatcgcgctgaacgccggccacaacatgaccgttggatacaccttcgaccgcaaggagaagaaggaccacggcgacggcggctggatggtcggcaccccgctgaccgacggcatgaaggtgctgctcgtggacgacgtgatgaccgccggcaccgccgtgcgcgaagtcatccccaagctcaaggccgaggcgaacgtcgaggtcgtgggtctcgtgctctccgtggaccgcatggagaagaccaaggactccgacctgtccgccgtgaaggccgtggaagccgaattcggcttcccggtgctctccatcgccaacgtgcgcgagatcttcgacgccgccgccaagatgaagaactccgacggcaccccgttgctcagccacgatatccagcagcgcgccgccgcctaccttgaggaatacggcgcctgatcgtcttcaacctaaaaccaaaagcgggcttgcgagcccgctttttttattacgatccatgaacagcagtaccatattaaggcagaagctttggcaaggagcgtgctatgaactggttagttggtatagggctatttgcgctcgtgggggtatgcagttacttcggcatcgagcatcatctggacagtaaagcgaacaagttgtcgcaaggtaatgaagaagaccgccgagatgctgccgaattacgtgatatcgccgccaaaatcgatcacggtaagtattacccgatgctgtaacgggcaatctgggcctaaatggatgctatctccgcttcaaggggctgatgtcgtggtttccagagatctacttccgtttcgaggggctgatgcccaagtagaagcagcatgaaaatggcggaatgacgttggggtgatgccgctcatactcgggatatgacggatgaacagccccttgaaacggagatagatgtctccagaaggccaaatcagccccttgaaggcgagatagggttttaaactctgggaccgactcgcctgtgatgaaaacccgctcggcgtagaattaccgtaggttcgttacattcgaacaaggaaggccgccatggggaacatcaccgacgatatccggcaacatttcgacaccttcgccgcactgccgttcaccgaggcggacagtctcgccctgtcccagctggcctacgcgcgcatgccggataacgtgccgcgctatcacgaggattcggcggacgccagcggcatgattcccgcggtctccatccgcgacctgctacgtgccgaatgctatgacgacatgttcggcaaggtgtggtcgccgcagatgaacgtcgatctgctgcgtgcgatgggggagagcccgcgctggcgcgacctgcgcgtcggcgaatacgtggatgaattcgacgccgaaaccaccaaacagttctcggcctgcgtcttcgaactgggcgacggcacgctgtacgtggctttccgtggcaccgacagttcgatcgtcgggtggaaggaggatttcacgatggccttccgccgtccggtcgcctcgcaggaggccgctgtgcggtatgtgactgatattgccggccgctgggccgggccgattatggtcggcggccattccaaaggcggcaatctggcggtatacgcggcggccaatgtgcccggcgaaattcagggacgtatcacggccgtgtattcgcacgatggtccaggcttcgatgaggcgttcttcgatgaggatgggtacgcgcgcattgcgccgaaaatccataaatcggtaccgggatcgtcgatcatcggcatgctgtttgagactcgtgagcatgtggaagacggctatacggtggtcagcagcgacggtgccagcatcatgcagcatttcgcattgcactggcaagtcgatcatggccaattcgtacaggctgatggactgacaagtagcgcgcgatacctggcacgcacgatcaacggatggatggcaaaatacgacgacgagcatcgccgcaagttcatcgaaaacctgtttgccatcttcgaggctggcgggtacgtcacgttcggcgaactcacgtcgcacgtgacgcagtcgttgccggtaatgctcgccgcggcccgcagcattgatgttgaagaccgtgacgtgatgattgaggtgcttaagggatttgccgcgacagccgccacgtcggtaatctcggccaagtagccggaggccatcaaactggttttgccagtcagtctcaatagcgcaagagccggcccctgagatactcaggggccggctcttacttccatttccccagcggggttggcttaatcgcagtatatctcactgctgaccatgactgttttacttactcctaatcaatgagcttgtagccgtgatcggcgactacggacttgagcttggtgaggtaggtttcggcggccttggatagcttggaacgctcgttcgtgacccagccgaccagcatcgtttcgtcggtgtcgagcggcacggtgacgatcttctcattgttgaggtcgccgttgtcgatgccggtgcacaccgtgtagccgttgaggccgatgatgaagttcagaatcgtggcgcggtcggtcacgttgatctgcttgggggagtattccggccagactgcctcctcatagaagtagaacgagccttcctcgccctgttcgtactggatgaacggatagggcttcagatcctccatggtgatgatctttttggcggccaatgggttgtcccgtgagatgaacacgtgcaggggggcgcggaagagcggatggaattcaaggtgtttctcgcgcaggagtttaccgatcacgtccttattgaagtcggacaggtagatgatgccgatctcggactgcatgttcgccacctggttgatgatgtcacgtgtacgggtctcacggatcgtgaactcgtattcgtcggacttgatggagttgatcatctccacgaacgcctcgacggcgaacatgtagtgctgggtggagacctggcacagctgcttgcgcggcttggcatgcttgtaacgctcttcgagcaggtcggcctgatcgagcacctggcgggcgtaggtcaggaattccgcgccatccacggtcagggcgatgccctgcgaggagcgggtgaaaatctcgatgcccagctcgttctccaattccttgaccgacgagctcagggccggctgggagacgtacagggcatgggaggcctcgttcatcgagccgcactcgacgatcttgacgatgtatttcagctgcagcagtgtcataaagtctatttatatcgctagggatggtcgccacacgggtttataacctcatcaatccactatggcgacacaatatgagacgcctcgcatatcgcggacgctgtgtaacgggatatgcgccacattggtaacctaatggcatcgacacgagcgggaagggccaagcgtgagggttgtcaaagtgctgatgctgtgcggtctgaccgtcggctgcctgggatccgtgttcggctccaaggccgcggccggcttcgctcggaacctgaggcaggaccagtacgatgccatccagaccttctccttctccagcatcgaccgcttctccacgccgagcctgatgaccaggctcggcgccgacgtgatgaacatccagaacgccttcatgatgattctgcgcatggtgccgcgtgccgcgtcgttgaagtgctcaccgaacagtgcgacatgccggtcgccaaacggccggtcaccgtcgtcaaggacgggtccatagacttcaactgccgcgacgcaatatttggcgacttacaggcgtacgccgagttcggcgagcgattcgcgcgcctgcgacgcgttctcgaagaggatgctgtggatgccgacctcgttggcgccgacgatgttcttggcggtgtcgtcgaagaacacgcagcgctcggccgtgagaccgaagcgggtcaggaccagctcgtagatgtcggcgttcggcttgtgcatcttctccacgccggagaccacggtgccctgcagcagctgttcgaggcgcgggtacttctcgaaggccaggtggaaggtctcatgcgaccagttggtcagaccccatacgccgtagccgtgggccttcaaatccgccagcagttcgaccatgcccggcagcgtgcggggcagcgcgtccgcgtagtggccgatgtagaacttgaagatgtcggcgagttcctggccttgttcgcgtaccacatccgggtagatgtccgcgaaatcctcgccggcgtccatgcggtcctcgtagtggaagaagccgcaggggtcgtcgtcggcgcagatgcgttccacgatttcatcggggaatcggccttcaaggcatgcgcgggtgttccagtccagcagcacgccgcagaagtcgaaaatcacgtcggtgatgggggagttggccatgatggttccttgtgtgtttgggtcgttgggtggggtctgcgatttagtgtacggggtttgtgtataggtcggggtatgtggagtttgaggcttatgtttctctccctccgtctcggctttgccgagacacctccctcgtcagagggaggtcaacaaggttatgcgatgacgtcggcgatggcttcggggatggcgtggatcacgtcgccggccacgattgggtggccgagcgtcatgaagcgctggcgatgctcgcggccgatcagttccggctcctgccagccctgctgctcggattcggaggcgatcgccgccgccaggccatgcaggtaggcggccgaggccacggtctcgcccgtggtggccacgtcatcctgctgggcgagtagggcgccggtcagaccggccagtacgtcgcccgcgccggcggtgcccagccaggccggcgcactgcccgacgcatagacatggtcctcatccaccacgatggtcaccgcgcccttcagcaatacggtggcaccggtgagctcgtgggcgcgcttcgcgctggccaacgggttcagccgcacgtcgtcggcggtgtacggctcgtgcgaatcggcatgctccgcggtgctggcggtggtttcgaaccggttgagcagtttcgccatctcgccggcatgtggcgtgatcaccacctggccgggcacacgctccggcagcaggtcgagtgcgccggcatccaccacgattggcggcatgtcgtaggcgtccttgttctcatcctcgctgccgagcgcgtaatgcttgagcaatgcggcgatggtgtcccgctgcatatcgccgtcggcgccctcgacgctagcctcgggcacgccggaccccacgacccaggactgcacatgtcccttgccgatcacggcttccggcagtgcggtgagcaccatgttctgcgcgcgctccgggcccagataccggaccatgccggtgttcgcgcgggcggcggcgctggtggtgagcacggcggcaccggggtagcgctgcgagccggtcaccagaccaaccacgccccgggagtatttggaatcctcgaaccgggggagacggaccgcgtcggacgcgaacgaattatccaccacctcgacgtccggatccttgtcgtcgatatcgaatccgaaatcgaacaactcgatacggccgcaggcgaacgtggcgggcggcagcaccgcgcacggcttcatcgcgccgaacgtgaccgtgaccgtggccggaatgtacgggccgggcagagaaccatcgttcacaccgacgccggatggcgtatccacagcaagtaccagcggaaaatcgcctgacgactcatggttcggcagggcgggctcatcgggagactcgccgtcgagaccaagggcggaggcgagcgcggcgggaatgccgcgtagcgagccttgaatgccgatgccggtcatcgcgtcgatgatcagatgcgatttcctggccacggcgatggcggtctgcaatcgctcaccggcctcaccggcggaaaacccggacgcgcaaccgggaatatcggctgccgggtcaagcaccagcaccttgccgccggcgcgcacgagcgcggcgaatccggcctcatgcagcgaccggcccacggcgatggcagtgacgttcgcgccctcctgggccagcgcggcggccgcgaacagaccatcgccaccattgtctccggccccggccagcagcacgatcgacgtgtcctccagcgccagatcctcgtcgtccagcatgccggccgccatgtgggccgcggcctgggcggccatgcgcatcagcggcacgcctttgtccagcaggggtcgctccatggcccggaccgtatcggagtcataggcgctgtgcagcagcagttcgcgatgatcggcgtcttcggtgtattccatggcaacccctttcttgtgtttgttacttgcggcccgtgtttacaggccgtacacctcgtgggcgaacttttcgagcacggggatcgaacgcttgactttctcggtgtcgatgcagtaggccatgcggaagtatccgggcacgccgaagctgtcggacggcacgaggatcaggtcgtattccttggccttcatgcagaacgccacggcgtcgtcctctaacgccttggggaagatgtagaacgtgccgccggggcgcaccacgtcgaagccgatgccggtgagcgcatcgtagagcaggttcatgttcgtctcgtagacgttgaggtcggcggtctggtcgatgactttggctacgcccagctggatcgagctcggcgggcagttgtggccggtgccgcgcgagatttggcccatcatcggcacgagcagatcggcgtcggtggctgcggggttcaccgcgacgtagccgatgcgttcgcccggcaggctcagcgacttcgaccacgagtagcaggtcagcgagttcgcatagaagctggccgggtagggctgggtggctccgtcgaacacgatttcgcggtaaggttcgtcgctgatcaggaagatgtcgtggccgtactcggcctgcttggcggtcaggatcgcggccagacgcttgagcgtgtccgccgaatacaccgcgccggacgggttgttcggggtgttgatgagcgcggcctgcacgttcgggttgagcgcggcctcgaacgcctcgaagttgatttggaagttctcggtgtcggccggcacgatggtcagcttggcaccggtgcccttgacgtacggctggtattcggggaagtagggggcgaaggtgatgatctcgtcgcccggcttggtcaccgcacgcatcgcgtgggacagcgcgcccgccgcgcccgtggtcgggaagatgtggttgccggtgtatgccatgccgaaacgttcgttgaggttttcggcgatcgcgtccttgacggacgggatgccgagcgagggggagtagccgtggatggccgccggatcgccgttttcgtagaggtcgaccatggcgtcggtgaaggatttcggagccggcaccgagggattgccaaggctgtaatcgaacacgttctggtagccgatttcagcaccgcggctcgtggcgtactcgctcagcccgcgaatcacggacttgccgccaagcatggccttgtattcctcattgatcatggctgttctcctcgcatggttgtactggtatgcaccacgctactactatcgcggccggtttgcgccatttgccgcgccgtacctaagccggctgttctatttgttctattagtggagtttgaaccggcatatacccttgcaataaagccatttgtagggtctgaggctttccggggttgcttatctcatagattttcggcctcttgatatttgcggttgatagctgtgatgtgtgtgggcgatggctgttgaggcatcatggggatctcttcgactgtccgccgtcgccatgccgccatgatgcctacagaaagtcgagttgcgtatttccgccaagcagggtggtgaccggtggggggcgatcggtgggggtgaccgacacccgctataggcagcaggcagccgcacacatcccaatatctgtgggacggcagacgagtcaatcgtttgtcgtccgcgccgtccctcaagggcgcgggatggcagacaagtcaactgtttaacgtccgtagcgtcccacaccgacgactgtagaaaccgcggaataacgccgattctcgctgcaactccatgattatgcacaaccgttcatagcgagcgctgtgggacggcgggcggaaaacggccgaatccgcgtgccgtcccacacctcgtacaatccgcgttttgggaaagcatcaccgtaaggctgacgcgcatccgcatccacagcaggagccttaccggccgtaatcccgcactcgattattttttctgacaggaaatcgaacccgaaacactaacccatgcccgccccaccgcaaacagcgaataaccaaaaaaatgcatgatctatccttggtgccgaataatgagagcctgactgtagtggctacgggtagctatatcggagaaggattcgatcagaagcgtttcgacacgcttctgcttgccgctccggtctcgtttgagggtactctctcgcaatatgtagggcgacttcatcgcgagaatgatggcaagaccggggttcgtgtctatgattacatcgacgtgaccgtgcctttatccgctgtcatgtatcgaaaacggctgaaggcatacgcaaatcaaggatattcggtaaatcctgaccatactgacaaaatggacatgctcagtgcaaaggcggaagcgttgcgcgcttgcatgacggccgcgacgcagggcgaagatgctgcggatgcgttgctcgacacccggtctgacggattattcgaaggcagcatcgttacagccacgaattatgcagagatactccgcaaggatattgccggttgcgcacgttccctgattatctcggctgaatatgtatcacaacagggactcagcgcaattgacgatgaattgctccgactggccgacaggaaagcgctcatcgaagtttatgtccgtttgccggcgactgctgcggtggcaaccagaacacgaatagaacggaatattaatcggctgcgtgctattgggtgcattgtccggaccgtcgaatcgtgttccgattttgccataatcgatgacggattgatttggtttggaggcatccctttacttggcaatccaaggagtgacgactgtgcacttcgattcaaagatacgaaaatcggcgagaatctagcagatggactgaaacgacggtcgtcctgagtcaatattcagttaagataatcgcgcagtacgagggcgtgattgatgtgcgggtccttggcggcatagagcagggtcacgtcgggatgctccgcgcagatgtggcgcagattgtccacggcggcattggcgtcgagctcggcgatgtaacgcatgcggaattccgcgaatttggcggggtcatggccgaaccatttgcgcaggaggggagagggagcgacgtccttcagccacaggtccaacgccgcacgctctttcgtcatgccgcgaggccacaggcgatccaccagcacccgatacccgtccgacgcagtcggctcttcatatatacgtttgattgcaatacccatacgccccatgattggcgtgcgcttgccggaagtcaaggggagacgcgatccatctacccgttcgatttctgggtgttctgtctaaggccttgtgctatgacagctagcgattcagcagcttttggtgatatcgtccaaccggaccgccttgcccctgtcgaaggtgttcatagtgagatcgacgggtttggtcttgatgaacgctgacagcgcggtgtgcggcgggttgtcgatcaagtgggtgatgggggcaatcgcctcctcgacgctgacgcccacaatggcgtaaatggcacgcgccagcagcttcatcagtggcgaatcgaaactgttcaatgcctcattgctgcgcacggcccaagggttgaacaacacatagtggatgcggcctccggtctgctgttggttttccgcgaagagcactcccagcagatcgttcagacgactcgtacagatagtcgcgcaatgctagaacgtgattgatgtgcacccttcattgacggtctctcaattgatctcctgcgattcatgccgtataaggaagttctcgaccaaggcgatcatcgtgtccttccccgcaggtgcggacagcgcaatcatcagcgtcatcgccgccaaggcgttaccctccacaagcaggggagtcatcgtcgcccagtatactgttgccgttcaggaaatacacgaacagtgcggcggcacaacgtttattgccgtcggagaacgggtgatccttgacaacttgatacagcaggttcgcggctttctcctgggtggaacggtacagttcttcgcctccgaacgtctggtagagtcctgcgacgattccttggaacgaaccgttgcgttccctcccgaacagatcggattgcgtgtagaacggcatcgaccggatgaacagcatcgcgtcctcataggtcaagacccactgggactcgtcgcccttgggtatagggacattgcctgtgtcatagtcgttaagcagcacaagactcggcaaatatcgttccaagatctctgcggtgccagcaatttccggttcggtggacctcgatagcaccttgacgacggcgtgaagtgcgtcaagccgcttgtgattgatggtgtaaccatcaacgagatgctgcttcagaactgagttggcccatcgccgggaatagatgccttccttggatttgacgcggtatccgaccgacaggatcatatccaagttgtaatgctcgacttggtatgtcttaccgtcagatgcagttgtcgcaaattctgcgacaactgaaaatccattgagctcttccctcaatgcattgccgatatgcttgccgattgttttgatatcgcggccaaacagcaatgccaattgctttctgttaagccacaccgtatcctcgtccaccttcacatcgaggtgcacggtgtggtccgcgctctcgtactgccggtcgagaaccgggtggcaagggcggccaccaccagtatagtcaccacaccggcgcacaggatgccggcgatggaggccacatccgaagcgatgtccgcacctgcggccggcagcagtgtgccggaagcgtagtcgaagcgcgcgatgtacaggatgtagagagcgaccgtcaccaccgtctgcaatgccacgtacacggcgtagataccaaacagggcaaggattttcgcattgatgatcgtggcgcggtccagatccttgtacaggaacatgcggccggaggccacgggcgtatagatggcaccagccaccagataggccatgaccaccatcggcagcatcagcatgttctgtacgacgaactcgccagcgaggaaatccagcacactcaccgaaccggtctttccgctgactttcatgaaatcggagttgaacaggttcacggccggcagaatcagtatgaatgacggcggccggatccaaagccgcgaccgccgcacgtttcgcgacaccgagcggccggccaagctcgataaccgtgatccgcttctgttcgccggcgaattcgtccgcaagccggccgcctttgatgaacaggaatcgcccgcacaactcctgcaattcgttgagctgatggctggagatgagcatggcgatgctgcggtcgcgataccgccaaagccccacaagttcaagcaccgggcggattgggaggtgcgggcggcgggtcggacgatcacagtgtgacccgaatacgttcatgaatcatcgaatcacaaggcggggcggcccgcaagtattcgagagtcgccagttcggtcgatttcaatgacaatggtgtggacgattacgcggatatcgtggcgggtgcgcgcaaggacgccgaaaaccatccggcttacgattccggctactatcagggcggctatccgccggccgattgcggggcgtgcaccgtacgtgattcacaacatggcgcagcggcagcgcgaaaacgactacttcgccttcaagaagcacatgacggtcaccgggcactaccgtttcgacgcttcgaaagtgctgtagagcgtactcagggcttggcggtgacggtcggagcggcgtcggcattgccggctttggctccggctgcatcagctgaatcggtgccggccgcactggcgttagcactatcgtcagcgttggcaccgccggctttggccttggcatcagccgcgctcccgccatcgatcaccagtcgcagataatcgcggtcggcggacttgcggcgcggcacgaaccgactgatgatggagtttttcttgccgcggttcttcacgtacaggaagccgaacacggagaacacgaccgcgccgatgaagttgacgataagatcctccatcgtgtcgatcagaccgatgtcgaggtagccgccgaggcccaagtcttggccattgaccgtgacctgggtgatgtcgttgatgcgaatcgcatggttggtgtgcgtggggtcgagcatcaccgagctgatggaatgcacgatggcgtctttctgcatgtcgaatccgaacaactggtccatgccgaattcgaagaactcccagatcacgccgatggtcatggagaagcagaaggagacgatcgccagatacaggggcgaaagctcgaacttcacccggtcggaccggttgagcaggtcgaccagcgagaagccgatcgccgcggcgaggaagccgttcatcgtgtgcaacaccgtgtcccagaacgggaagatctcatagaacgaactgatctcgccaagaatctcggacgagaacacgaacaccagcacgatgacttccagcaccgaaggtagctcgatgcggaactgcacctggatgaacgccggcgccaacagcaacagcaacgtcaggatgcacaggaacacattttcgtagtcgccgttaaagaactggagtattgccatggcgagcaccagcatgcgcagcaccacatagaccgcgaatgagcttttgtgttcgcggatttccatgtctacggctcggctcatggtcttccagcgtacgcgccaggacggtttgcgttgtgcgtcgtgctgttgtgaccgtttccgggtcattcttgcctctttctcgcattgttctcgcgccagtctatccgaacctgcttacaggcaatcggcaagaacgggcgatagtctggccgcatgaaccgaatggaaaccgatgccgcctcgattgtggaccgcacgaatcatgcggcgatgctcgatagggccattgtgccggcggcacgccaccgcgtgtgctgattgcagtgctcgccgtgctgttgtaccgccgtatgggcatgattacaccgctgatcgtggctcatggcatgtatgacgtctccgccgccatgaccaatctgaccggaatcgccggctcctcgtggtcactggtcgtagggctggcaatcatggccatgccggtggtttgggctatcgtgaggtgtgcgagataggctttgtaccggttggcagcaaatcaaaccagcgagacaacggaatgaacgaagcgaaaggaacggtatctgatgactccgattgaattgtcaacccgacgccgggttacgggactgacttcggatgagttcgccaggctgttcgtctctttgcaacgcgatgtggacggcgaagccgcgcattggagcgccacggacgtcgaatcctgggagctggtcggcccgccggtgaccgccgaacagcatcttatcgacacgttcgccgcggccaacgaattcgtggccacgcttgcggaccgtctgtaccacacgatcatgccagtcacggaagaatcggtcatcaccgcatacgctgatgacctcacattctgggcatcgcatccggaccttggcggagtgccgtgcgcattatggaacatcgccgcactgcaggcggccgaatgggcccgcaaggaaaccggcatcgcctgtgaactagacgtgcgcgaaccgctggtgtgacagctgagctcaaacatgggcgtaggtaacggcatggtttgaggactatggtgttgcgttaccggtcggaaaggatatgatggtggggcgtcatagcaaaaaagcgcgtggacagtcgaggagacatgcgcgaaagccctccgtttggagtgaaattcgcggctatctgctgacggtgatcgcggtgatgctggtcgtgttgctgggacgcaccttcgtgttcaacgtctatgtgattccatcccgtagcatggaagacacgttgcaaatcggcgaccgcgtatttgcctcgcgattgactccgagactctttgcactgcaccgtggcgacatcatcgtgttcaaagatcccgcagactggatggagggggagcagcttcccaccaatctgatgtcgataatcgacagcaatcgttacctaatcaaacgtgtcatcggtctgcccggcgataccgtcgcctgcaagggatccggggagcccatcacggtcaacggcaaacccattgatgaaagcgcttatcttaagtccggcgtgaatccaagcgacagtcctttttccgtaaccgttactgacggcaacgtgttcgtgcttggtgataatcgctccaattccagagattctcgataccatcttgacgacggcaacaatgggctagtgccatacgacgatatccaaggtgtggcgttgttccgcttctggccatttacgagaatcggcttgctcaattgagtttggcgtgaatacgcaagttgacatgtgtcgcacggcccggtgcatcctgcagtcggaccgtttccggaaccctccccccgaaatctgacgacccccctgtctcacagctatcgtacagctccgatacgggaaacgtgcgggtgattccataacgactacgtatttcaggaagtgacgtgtatcacattatggtcatgtgttcagtgccgcagataggcgaagtttattcatgagccgaatagggccggtgaagcgggctctcactgcgttcataatacggcatatcgtgaacggcgttatcatcacagtcaggccgaattaaaggaggctcggtcatggtcgccgcatccacggcattcagcccgtcaagcacgatgacggccagtttggtggaatcgactggcctgcccagtgccgctattcctgtgcacgaggatggtaacaacggcaacggcgacagtagtgccgatggcagcggcgacgacggcggcatggtcagatcgctgagcctgtggaactacttcaccatgggattcggcgcaatcatcggcaccgtatgggtgctgctggtcggtgactggatgatcgtcggcggtggcccggtcgaggcgatgatcgccttcgtgctggacgccgtgtttctgctgccgatcggctcgacgtccggcgcggttaccatggtcgggtcgtttctgcccggagtgctggtgatgacgccgctcttctacaccggtttcgacacgattccgcagagtgccgaagaggcaagcgaaggccttgactggaagaagttcggtatggtcatctcagcttcgctgctggccgccggcttaatcatcattggcctgcaggtgctgccgttctccccggccgcgctcaaacccacatcatgggcaatcgtggcggtgtggatttgctgggtctggcattgcgttggatcagtgcacgttcacggcgcgaatagcggtgcgccggtaggtcgcgagccgttcagtcgcgcgcgacccaaagcgtatcgaggtcgtcggcctcggtcgcctttttgcgcttgcgtacccactgttgcaggaaatacgccccatagcaggccacgatgaacacgagctcggccacgagcgcgaaccgttgctccacgtcgaaaatcaccaatacgaacgatgcggtgcacaggatgaacgccgcccaagacacgtacggatagccgggcgtgcggtatttgagttcgctggtggaatggccggactccagccaacggcgacggaacacgatctggcagtaggcgatggcgatccacaccaccacggcggacaggccggaaagcgccaccagcaccaggtacacagtcgaggcggcgatcacggaagacaggagcgccagcaggccaccggccatcgcggcgcacaaggcgagcatcggcacgccgcgacggttcgttttggcgaaccagcgcggaatcatgccttcgttgcccatcgaccacaccatgcgcgtggaggcgtacaggccggaattcgaggcggaaagcacggccgtcagcaccacgaaattcatgatgtcgcccgcataggggatgccgatgctgttgaagacgagcacgaacgggctttcgcccacgccggcctggcgccacgggatcagcgcgcacatcacggtgatcgagccgatgaagaagagcaccagacgccacagggtggtgtggatggctttcggcacggcggtttgtgggtccctcgtctcaccggcggtcacgccgatgagttcggtgccggagaacgcgaagttgacggtcagaatcgtggcgaacaccggcatgaagccgttggggaagacgccgtccttgatgagattgccgaacatcggggcatgttggtagccggcgaccgggatgacgccgaagatggcgagcgatccgatgacgatgaacgcgcagatggcgaacaccttgatggaggcgaaccagaactccgcctcggcgaagaaacgcaccgacaaggcgttcagggtgaagatgagtgtgatgcacgccgcgctccacgcccatgtgggactgttcgggaaccagcgctgcatgagcagcccggcggcggtgaactcggatccgagcgccaccgtccatgtgagccagtactggatcgcgatcacgaagccggtgccagggccgatgaacttctcggcatacacatggaaggagccggtcaccggcatggccacggacagttcgccgagcgtgagcatgaccaggtagacgatcagcgcgccgatgccatacgccagaatggtgccgatggggcccgcctgctggatggtgtatccggagctcaggaacaggccggtgccgatcacgccgcccaacgagatcatctgcaggtggcgggattccatgccgcgcttcaggttggtatgcagcgcgtgctcgcctttgccgtcatgtggcgactcggactggctgatttgcgctggttggttcacctgttccggctggttttgacggccatccgtctgaatctgcggttcctgctgcgaggacggcgactgtgccgccgtgtcggtgtcgggctgactcatgtttctctctttgccatgcgtgcgttccataggcgtcgtcgtgacggcccggaatagtatacccgcactgaggatatagctgcgctgcatgatgctgagtcaaaatcagcttcaaggggctgatttggcgtttgccggaggtctacttccgtttcaaggggctgttcaactggcggaacgcagatagaaatggcattgttctatcactattccgccgtttttaaccagtggctactttggcatcagccccttgaaacggaagtagatgttccgcaaagtcaaaatcagccccttgaaacggagataggcactcgcagcggctacttcaccttctggatacgcagcacgaacacggcagcgcacacggccatgacgatggagatggcgaacgccggcgtgtaggtgccggtcgtggtcttgaccacggaggtgatggtgggaccgactgcttggccgagcgtggtggccaagctgaggatgccgaggtccttgtcggcctcttccttgttcggcaacgcgtcgacgttgagtgcctggtcgatggccgagtacacgccatagccgaagccggcgatgcccgcgtacaggtacatgcccgtgacactcggcatgatccacggcatcgcggtgccaatcgcgaacagcagcgaggcgatgatgactggtaccttgtgcgtgtgcatcttgtcggagatcgggccggagatcagcgaagcggtcagggaaacgaccatggtgatgatggacatggtggcgatggtgccggcagcctcggtcttggtctggtgcacgtaatcctcgacgatgtagagttggtacacggagatcatctggtagctgagcaacatgcacactcggcagccgaacgccttgtagaagtcacgcgaggtggagaacttcgggaagtggaaggagacagcgagatccttgagcgtcatcttggtgcgttccatgtcctttgaggattcctcgcgaggtcagatgtcaagcgccacgaatccggaagcccatgatcacggcgccgatgatgaagccggcttgcgcattgttgatcatgcgagagccgatcatggtgccgatgggctggccggtgaccatgccgcagccgtagaaggagtcggtgccgcacagcttaggcatcgcgattatgtgcctcgtgctcatcatccgtatctgtctattgcctctcttcttctcccaaatgcgcgcgacgcagcgtatgcaggtgctccaaccgcaaatccaacgtatccaacgcaagtacgccgcgcgtaaggatctgcgttccagagaagccatgcaacgtgaaattatggctttgcagcagcggcataacgccaatccgctcggttcatacctgcttcgctgattcaggcgccgattctgtgctcgctgttctacacgctgcaatccctgcccgcaagcgccgccgggaatgcggaaccgttgagcggcatcgaccgcgtcatggcgggcgacatcgaatcatcgtccatattcggcgtgcgcatcgccgactcgttcggcacggtcgtctcgccgcagtcgcacgtcgtcatcggcgtggccgtggcgttgatgtgtctgatgttgttcgcgatgcagtggctgctcatccatcgcaatacgccgaaggacgccatggattcaccgcagttccgcacgcagaagctgaccgcgtttgtgttcccggccatctacgtggtgtcgggcggcaccttgccgttcggcgtgctgctgtactggctgaccaataacctgtggaacttcggccagacgctctgccaactgcgatggtttccggcgcccggatccgaggcggggagcgcaaggccgaacgcgaccatgagcgggagaaccggcaccgcgtcgcctccggattgccgtctttggaagaagagcgcgcggcggccgcgcgtgaggaggcccacgtgcgccgcgagcgtgaaaagtcggtcgccagccgcaatcgcagacagcgcaagaacgtgcagctcgccaagcgttgatggcacatgggagaggttacgggggatgcgctgagaccctcgtccccggaacggttcgaagtgctatactgcttgcactacgctgcgatgcctgagcgcaaacggatccaagaccttacgatgacaggatgaacgatgatggccacgaaccgcacgttactggaacaggcccgagaattgcaggcgctggcccagaccggactgatgtactgcaaggaccccttcgaccgggagcgctacgagcgtatccgcgcgatggcggtcgacatgctctccacgcaggttgatgcgccggccggacaggtgagtcgactgctcagcgccggatatccgacgccgaaactcgacactcgtgcggccatcttcgatgaagaaggcaggatcctcatgacgcatgagaacagcggggaatggtcactgcccggaggctgggtcgacgagaaccagtccattcggtccaacgccgtcaaggaggtcaaggaggagactgggctcgatgtgaggggcgagcgactcatcgcggtgcaggactgcgccaatcacaacgcgctgacctatccgtacggggtgctcaagttcttcgtattgtgcagccgcgccggcggttggttctcggccaacatcgaaacgacggaaatccgctacttcgaggaagaccggttgccgcggctttcggaaacaagaaacaccgcggaacaaatcgccatgtgttttgcggcccaccgcgatcccgactggatgacgctatttgagtgaaccccgtgaaggcatccgcacatgcgcgttgcgcggcgccgcctgatcatcgtgccgacggcgagcatcggttccgaacactgacgccgaaccgtcgaagccgttcctgtgggagattcgcgtccaggtcatgcagaaccaggtggccatcgccatgtgcaaccgggtcggcaaggagggcgatgtggcgttcgccggccaatcagtggtggtggacccgtacggcaacgtcgtcagcgagactgatgaccatgaacagttgattatcaccgacatcgatctcacacaaaccgcagcagcgcgcaaacagcgaccattcctgaaactgcgccggcccgaatggtacgcctgaaggggcgaatgggtaataagcaatgtcacgattcgccgcacccatcagccgcattcgtgccggcctacagatacatgaccatacgcagattgcagccagctggtgcaaggcgggaatgtgaagtcattgtgcgtttgcttcgcgaagccgcgcaatgccggattcaaagcagctgctcatcattgctatggatgcgggactgaatggtcacttctcttggaccgccggtctcactgggagctagcgcgtcaccgtcgttgttccagaagcgcaatgcgccttgtcgggtctcatcgttgacggatagcaagagatctccctcaaatagtgtgcgtgctgtgcgatgctccgaacgagcatcttgatgttctgcacgaagcatgaggttcctgccccaacgatccggcatgcagtcttgaaagatgcgatgcatcgcattatgctcggccgggaacgttccgggggagaggggcatctctggacagagggatactgcgtttgaagagcgcatataggccgtatcgtatgtggaatgtgccgattcgatgccgcgcctgatactggtgaataatttcccgacggtgacgtctgtgccgttgagctgcagggtgacgattgcttccatgatgtgttgcgcctcctgctgtgctatcgaatacgtttcggagtgtcttcgtcggcgcgtagtttgccgatatctgtgttaagagggtccgtcgcttgctgtacgccgcccagcagtccaagcagacgaacaatgcggaggaagttctcaaagctgccattacccgtacgcagcattttggtgaccgttggcacggataatccagcccgctcggccagcaaggctacgggaatgcgctgttgtctgcgcgccaaatcgaggttggcggatatctgacgcatcgcccgactgaccgggattggtgtgcgtgtcggcatattggcacctcctatcccaaattttaacataaataattctttagcttatagttacatagctaaagaattatttatgtaaatttgtatggactagccttatgcggaggttacgccaatatacgacaagaacgaaccaacgtcagcccggaatcttctcgatgatggtgttcaaggtgtcgaaagcctcatcgatttggtccactacctgcttgccctggttgaccatttcggtgatctgttccgtgcggggttgcggcagcgcataaatcgacgtcttgacgcgcttcaagaccgcaccggcgtcggacaggtcctgcttgatggaagcgattttgggaatggaaagcgtgccgtcggagaagttcatgccggacagcagctcttcgatattgaagtccaccaacgtgccctgcgcggcactgtcgattttgggcagggcgttggtcgcggcgtcggcggccgcgcccagcatgccgcgcaccgctttcacgtccgaaccgtaatatggcacgtattcggcggcctgccatagcgcgccctgggtttcgtcgtgcgccgtgacgatgtgactgccagcgctgtccatctgctcaagcgcctgcttgaagtcgccctgcccgacggattgctgtgcttcagccgcatattcgcccgcctgctgcgcctcgccgatcacccgttgtaccgactgccagaatagccagccggaaacgcccaccgtcagcagaatagcgaccagtattgcaataacaacagtgccgatatgtttgcgcttagccataggaccaatgtacctgccactctgaccagtattatttacggattagcatcgtggcctgggcctcattctggctcatcggtatgttattggcgatgcgtagcggtggttatgcaagtgtcttttgattgatatcggcgcatgacaggtgaataacgtgtagcgggaaagcacgtctatggtcatattggcgttctcggcacagcaataaccgcggtattttttaaggtttgccaattcttccatctggtatgtgccgaacatggtgctgtcatgcgattgcttgacggcatattgcctagcttgaacgatacatcccattatcgattgcggttgacgttgcgtaaacgtctatcctgatggcaacgccgcgaaacacgcatggcgggtagaggataatcggcttcaagggggatgatcgatcatgaacgagaacgacaacacggcgaacgccgtcaacggttccggcgcgttcgatgtggagggcaatccgctggatacgggccggttgtggcccattgatcaggcggcattgatcagcggcgtgacgacgcgcacgttgcgctactgcgacgagaccggtctggtcaagaccgcccgcacccgggcggcacagaatcaaaccgcgaccgtgatgaacgccatgccgctgtccggctcgttcggggccattcgctccgcgctggtcggcgatccgcgtttcgccgacccgtgtggtgaggcgctctacggcagcaaggcatgcgccgacttcgtcaacgaagccaagaacatccacgcacggcaaatcgccgaacggttcgcggcggaacaggatgtacggaatcagccgaaatgacagggcgtccggctccgattgcgcgacgaaccctgcgaccacgtcaccggcttaatcatccaagctgcgcgaagcggcgcaaaagatgatgagtcggcataagcggcgtagggttcagtctgcgtgttttgcacagtgagttacaggtcctgaacgttcatacgggccagctcggcgcgacgattgatcttgtcacgctgatacaagtagatgccggccagcacgatggtggatacgttgttggacaggaacgcgatgaatgcggaaagcacgacgttccacatgttgccatacgcaccgatgtccgccctggcgaagacggtaatcgccgccacaagcgacagcagcaatgtgatggcgggcaataccagaccgggccacttgctgtccatcttcgaaagcctgatctgcaatatgatgaagccgatgcagatggcgatgagaaacacgaaaaacactacggcaaatattgtggcgccaatcatgattactctccttgcttgagctgcttgcgatattcgctgatgaggattttggcggtgtcgaagtcgagcttgtcgtcgaccgcgagccgtttgatgagcgcgatatacggctcgttctcgatctgctcgcccaacttgattttctggatgagccggtcgagccgaagccgaacggtggggtaggagacgtcgtactgcgcggcgacctccttcatggagcctgatgcgagcagaaaccgtttgatgaacgtcatatcctcgtcatcgaggttcgacatccacggcgggatcatcgtcgtatccatacctgcctccttcaattcacggcgggtttaataaaattaagtataccataaataatattaaaatcaaatagatatctgtttaaagtttttcgtagattagtttgaggtcgtgatgtaagaatgcgtacgcggacgcgaaggaccggcacatgtcggcacgcatgtagaagcatcggtcaatcggatatgcatcgacagcaccctaaggcattgacggatagccgattcctgtcatgcgatcgcttgacagcatgttgtctgattgactctttgagtgccataattgagatggcatgcgtacgcgtcggactttatggaatgcggggacgatatggttgcggacgatgaggtgcgggcctcccatggtgggcgtcggaatcaaggtctgctgtggtttttcggcgcttccgccacattgggcgtggccgccgtcacggccatcacgtgcgccgtcatccggtacggctggaatgacggggagttctggaagctggtggtgccggcggccgtggcgttggtggcggccatcgtgtgggcggcgctcggcttcatgcgtcgcgccgggcggacgcctgacgttccggccgacgcgaacgataccagcccggccgaatccaggttcgattcggcggccgcccagattctggcgatcgtcgccatcaacgtgtggggcgtcatgttcatcgtcttcgatacgttccagattgacccgtggcggtacgtgacatgggtcgtgcccgtgatgttcctgctttatctggcggtcttgggcatcggcagggcttgtttccgcaaacgacagaaggatattcgcttcccggaggaaccaagtatgacgagcagccgtccatcatacttggcataggcgggcagttggacgatgccgggcaggtcctcgttgtcgctggtctggttgagggcatattgggtgccggtcatggaacgctactggaatctgtcaccctagggtgtcactttccgtgtttacctcgacctgccatgcccctggcgcgaaggttgagaaaaacggcgtcaactttcacgacagggggctacctcatgacttggcaaaatgccggcacaccgattcaggcgctcggactggtgaaacggacagggttcgatgctcgaaccgcctcccgacccgcaaacacgcagactgttctcaataatgtttcgttggatatcgatggagcgggcttgacggcgatcgtcggtccgtccggcgcaggcaagacctcgctgctgtatgtgctgtccggattggacaggcccgattccgggcgggtgaccatcggcggtaccgacgtctacgcactgaatgaggaacggcgttcgcggttcattcgcgggcatatcggtttcgtgttccagcaatacaatctcgtgccgtatctgacggtcgaggagaacgtgatgttgccgctctcgctcgcccatcgcaaggccgactacgtgcaggtcacgcagctgctgtcccggttcggtcttcgccagagggcgaagacgacggtaagcgccctgtccggtggcgaacagcagcgcgtcgccctgtgccgtgcgctgctcatgcgtccggcggtggtgttcgccgacgagccgaccggcgcgctcgacaccgcgaacagcgagcttgtgctgcaggtgctgcgcgagctggcggatgcgggctccagcgtggtcatggtcacgcatgacacggatgccgccgctttggccgaccacgtgatcttcctgcgcgacggtcaggtcacccacatcgctggcagactcaccgccgagcagattgccgatggcatacgccgcactttcgtaccggccgggtcgccgccgttggttgcggcggcgcggtctgtcggcccgatgatggtgaacgcccagcctatccaatccgtccaaccgggccgaccggtccagcgcgtggcgtatccgcagcagcggaaggaggctcatcgtggctaggtatgtgctgcgtgtgttccgcgacaatgtcacgggatgggtacccacgattctggtggtcgcagtggtgaccacgctggtgggcatatgcatgaaccaattcgtgtggacctcgtctccgtcgttcacattggccgcgcggcaggcgggtcttgatccggccgagttcggcatggtgtcggtcacgatctatgtggtggtgtcattactcgcgttcttctcgttgacggtggtcggctcggccacggtcaaccgtattcacagcacgttcgcgcaatggcggcttatgggcgccagcccgagtcaggtgcttgccagcatgtggatgctcgtgggtgtggcgagcctgttcggttccctgatcggctctctggctgcagtgccggccagcctgctggcggttcccgagttcaacgccatggctgcggaaagcttcgccgatggattcggctcgttcgcacctcctgcgttcacgccgtcgatggccgcgtggctcggatccctgctgttgggtgtggccacgtgcatgttgggcgcgtccatcccctcgctgcgcgcagcgaagatccgtcccatcgaggtgattcgcggcacgggagccatcgggatacggcacggttggcggtcttgggcgcactgggcacttggtttgattgtcatggcggcggcgctggcattggcgttctccggcatgggcacgccacgggcgctcgcgttcggccaggaggcggggcagacattcaacagcgcgctgtgggccggcatcatcgcctcgttcggcatgtacatccttgtcagcatgctgattccgattctgttgggcatcggacgtgtcgtgtgtcgcctgtgcgggtccgcgaccggcgtgctcgccgcccgttccgccgaggcgaaggccgccagcaacacgaacacgattgccccgctcgcccttgccatgggactgtcggtcaccctgctgacctgcgcgcgatcctatggccggatactcgccttgggcggccatccgaagagcctgaactacgcggactcgctgctgctcataacgatgctgtgcatcgtgtccctggccaccagcatggcggtcatcgccctgtcgaaccgcagcatggtcgccgaccaggcattgctgcgcagcatcggcctgtccccacgtcgtgtgatccgcatgtatctctggcagagcctgcagctggccgccggcgcggtcattctctcgctcatcccggtcgccgtcagcgcaagcgttttcgccgcaagatccgcggcgctcgtcggcatccccgtggccgaaatcccatggccgggcgtaatcggcatgggcacggcctgctggctggcattgttcctcatccagttcacgcagattcgccccgcgctacaccgcagcgtggccgacacgatacgcacatgctgacatgcacgcaacatcatacaaaaagagccacaatgggagccatgaaaccgcaatccgcgcaggccaataaggtcacggtcctggccgtgccactggtcatcgccgtggtcgaatgtgcagcgatgctgtgggagcatgcgatcggagcgccggccgacaccatgtatacgtttgccaaagatccgctgggattggctctgctgctggcgatgaccatagccagcagtgcgatactgcttgtccgttactggctgccagccgttgccttggcgcttgaagcggtattgttaatagttgcctcgtactggcggttggactcaatcgtgatgattcagacgctcgtcgcctgctatgcgttcgcccggacagcgagggggcgcgggctgtgcgttggaggcatcggcatgatgctgtcgatgaccgcgtcggccatcatggtgcatccggacgttctcgcgaccgaatgggtgagtcgagtggtaacgttggcagccgtgggaggcggcgcgcttgcagtacgtggcaggcaacaggccaaggaagccgaacacaaagctgccgaggaatgccggcgggcagccgagctggccttccaacgcgatgccgcaatacgccgttcgcgcatagccggtcaactgcacgacagtgtgggccaggatctgaccgtaatcatcgcactgtctgagggtctggccggcaaaaccgatgacccacgcgtggaggatgcgctgcacggcatcaacgaaatcgcacgagagagtctgggcgacacgagcaaagccgtccgcgcactgaccgagttcaatggagcggcgaacggtgacgatacgcacacccaagaatcagaccagcattcatgggatgacattcggccgattctcgcgcacgcacgccggctgggcatcgtcacggtgttcaccgagactggtacgcgcgccgatgacgaagctcaggctgatttgtgtttcgatgtgactcgcgaagccatcaccaacgccatacgtcacggacagaacgtggtgcatatcagcatcgcctggaaccacagcgagaacggcaccgtcgccgtgattatccgcaatgacggcagtcccgcgcgcaaggacgcgcgcaaggatgacggtactgggctcgtccgtctattccaccgcgtcgaatcggcaagcggcatcttcgaatacggtccaaacgaagacggcgaatgggtcgtcgaggcgaccatcccgtccaacggagtgaacgaaaaggaccacaccgcatgattcgtataatgctcgtagacgaccagcgtttcgcgcgacttggcttccaactcatgcttgacgatgcttccgacatcgtcgtcactgcccagtccgctgacggccgatccgccatcgagacgctcgaacagctcgccgttcagcatcgtccattgccgaatgtaatcctcatggatgtgcggatgcccggtatggacggcatcgaagccactcgccgcatcaccagacgctggcccaccatcagcattctcatccttaccacgtacgacgaggacgattacgcctttggcggtctcgacgccggagccagcggcttcctgctcaaggacgtcaccaagcacaacctcatcgacgcggttcacgccatcgccaacggtgacgcaatactcaccccacgaatcaccagacaagtgcttgaacgaggcgttccgcatcccaccagcagccagcgccagcaagaaatgcgcaaagctttcgacgcactcacccctcgccagcgtgaaatctgcgcactcatctccgaagggctcatcaacgaggaaatcgccaatcaactcaccgtcgaacctgcctccgtcaaacgtgccgtgacccgtatcctcgcaactttgggcctgcgcaatcgcactcaaatcgccatcggctggttcaaagcaggcatgtagacctgctatttgctcagcagctcattcaagcggattgttgttacgaatgcgactaccgcacgcccccccaagacggattccatgttcgacaccccattcggcaaggtgggcttggcggattttagtggtggttgcaacacctgtgtgttttgccgctcttgatggcggtcttggattggtgcgatcgtatcatgctgtgttgatgagttcgagtattttctcggatggtttcctgtagccgagtgttttgcggggccggtcgttgagttcctcggcgaccgcgtcgaggtagtcctcggggtatgcgctcaggtcggtgcccttggggaagtattggcgcaggagcccgttggtgttctcgttggtgccgcgctgccagggtgaatgcgggtcgcggaaatacacctgcatgtccagcgtggtcgagatgcgtttgtgcagggtgagctcgcttccctggtcccaggtcagcgagttcctcaggagcttgggcaggtattgcattttccggatgacggcctgccggacgtgtttggcgtcgtgcccgtcgggcaggtgcaggaggatcgtgaaccgtgtcgagcgttccacgagcgtgccgatcgcgcttttgttggccgcgctgcagatcaggtcgccttcccaatgaccgggtatcgcccggtcctcgacttcggcgggccgctcgctgatcatgatcatgagctcgcggaaacgggcctgcgcgaacccgcctgcccgtgcggccggcgttgggcgcgcccgctcctcagggccttgatgacgtcctttttcagttcgcctttggcctggacgtagatggcctggtagatcgtctccgcgcacacatgcatagcatcattatccgggaaatcggcgcgcaggcgccccgcgatctgctcgggactccaatgcgcccgcaatcctgcacgaatgtatgcgagcaggccgggcaccgtatggatcttcgcgggcttgggtcgtctgggccgtccgcgctcatctgctggggccggtacggctcgtacatgccggtcgcgggattcgtgttgcgcaccagctcgtggctggcggtcgacgcgagacgattgagcgtgcgcgcgatcccgcgcacgctcatgccggccttccgccagtcggcgatgctgatgcgctcgtcctggctcagatacctcgaactgatcttttggggaatgtccacggtggaacgataccagtccaccgatggcttctcgttcctgccgttcgatcgtgtccttccgttgcgccacaccttgccggtgcgtttggacacgcccaccgcccgcgcggcctgcgtgaagttcatgcccgcctccagcagctcggcgtagcggcgccgccgcgccgcgcacatctcgccacgcgtcgcgtactccacgccctcgaacacccacctgtccacctggccctcccatcagtcagccaggcgttgcgacgatcactggaacccgcccttcgccattttttttggggggggggagagaccggtggcggcaagtgtgcgatgggagtcggatgcatcgtccttgcggatgatgcgcaggttcattcctttggccgatggatagtttcggcgaatcgagggagcatggagctaccgtcatgcgattggcctgacatgttgttgcgtttgcggccgctgaagggtgcaatagcggcgacattgcaacgcgcgggtctgggcaaggcatcctgcctttgccttcaggcccgcctttcgtgaagggtgattatgccagttatatcggctacgaatctctcgatcgggtacaagggttccccaatcgtcagcaacattaacctgcggttgagcacgggtaggattatctgtctgcttggggcaaacggcgcgggcaaaaccacgttgatgaagacgctactcggacggataaagcccgtgagcggagaggtcacgtacacagggacgaatatcaatgagatgtccgcggcgatagaccatcccagtttctttccttacctgagtggtagagagaacgtcgaggtggtctccgcgttctggggtctggatgtggacccggaggcggcgttggacggtgtgggcatcaatcgcgcggtgtatgggcggaaggcgaaggactactcgacgggcatgaaagagcgtctggagctgtgcctcgcccttgtgccgcatccgaggttcctgttcctcgacgagccgcagaacggtctggaccccgatggcatagcctccttgtccgaaacgcttcgcgcctaccgggacaaggggaactgcgtcgtcatctccacgcatctgcttcatgagatccagggcgtctcggacgagtgcatcatgattcgtcacggccgggccgtgcaggtcacggatctgaccggggtgaacctcgcggatctgtatcaggggaggtagggtcttgaacgccgtttcccctgttcgcgcgttggtcgcctactactggaacacgtggtatttcctcgccgcggtgtttggggccgtctcgtcccttctgctgggtgcgtggatctcaagcgcggcgaacggaaccccgataaccggagggtattgcgtctatttcaccgccacccagccgttgatctgtctttcgctgctcttcgcatgcgatgccagggtcgcgaaggcgcactacggtggcctgccgcgccacgtgtattccgcgtggacgccatgctcgctcagggccgtgttccgggccctgatcctgacctccgtgaacctgattggcgtactgtgcttcgacgccatcatggtcctgacgggtaccggaatgcacccgcatctggcagctgtcctgtgcttcgtcgtgctgcagagccttgcgacctccctgatctactcgatcgtcgagatcgccgccgatcccagaaccgccggaatcgtctcggccatcctttgctatgcatggattctcctgccgggcgaccttcccgactatgcgacgccctacgtcgcgaacgccctacggaccgtcgggctgaacctgaacggcaccgtgatgtcgccggcggaagcggcgagtcgagcgtccgtcggccccgtgatggtcgtcgtcccgatcgtggtgcttttggttgcctatgtgctgttgagccggttccgtcgcgaaggagtggagaggaaatgaagtccctattgcgtattgagcgtgtggcggtgatccgctggtcgacgctcgccttcgtggccgtgctgctgtttccgttgttctttttgcgttacgggaacacgggtgcggtggtgcagtcggcgatggtgatggcgcttcccgtaaccgcggccggtctcgtcttctcccatgcgagggtgccctcctcgtaccgttccttcagcatccacgaccggctcctgcttcgcttcagcgtgaagtcgctgtcgctcggcgtcgtgatcaacgtctgcctgactttgctgtacgggcttgccgtcgggctcgtcgtcaacgagccgctttcgtcgcgtaccattctgatgcttgcgttcaccgccgtcgtcctttccctggcatgcttcgttctgcgactctatgccagtcctctcgtcgcctggaacgtcgtcgccttcttcatcgtcgccggacttacggtgagttccggcatgttcgaggacgcgccgatgctgtacgccgtcataccaaccacatgggtgttgaacggggtgaaattcgccggttacgtgattccggtcggcgtcgccatcgccgcgataagcgcatgtctgctgttcaaggcggtgaaacgtgtctgaccgaagccgtatacgggtgcactgtttcggatcgtaatcgtccggcagccagctttctcaccgtattccgttgcgggagtgagcctgccgctttccgctgatcccgccatacaaagtcgactccgcacgtcgcgagtcttcgccgaacactatcattggtggcgcagaggtcgtgtgggaatggccgtgacaggggaggggtattgggcaagcttcgggcgccgcgttcggcgcgtggccgtgtgatggcggcggccggcatggtgatggtggggtcgttgggtatccagacgtcgtcgtccctgtcggcgtcgttgttcggcgcgttgggaccaattccggtcagttcgatgcgcatgctggtcgccgcgatcgtcattctcgcactcacccgcccgaaactggctggccggtcgaaaggcgaatggctgggcatcgtaatctacgggcttgcgatggcggcgatgaacgtctgcctgtactcggccatcgaccgcattccgatgggcgtggccgtcaccctggaattcctcggaccctgcgtggtcgctctggccggttcgcatcactggcgcgagggcctgtgcgcggtggtcgcgctggtgggtgtgggcttgatctcgtttacgccgggcggctacttcaatccggccggctacctgttcgcgctgggctcggccgtgtgattcggcctgtacacgctcttcgccgaccgggtaggcaaggcaggcaccgggctcgacgggctcgccctgtcggtcacggttgcggcgctggccacttcgccggtatccatcactcgcgcgccgcatgtgtcggccgcccagtggggcgtcatcgcagcctcggcggtgctgggagttgcgattccctacacgatggacacgttgtccgggcgtatcacgtcggcgcgcgtggtcggcacgctgttctccatcgaccccgccatgagcgtgattatcgccgcgctgatattgcgacagaccatcaccgcggtggccgtgatcggcgtcatcgtcgtctccctcgcgggtgccctgctggtgtggtcatccggcggcgatgccgtaaacggatgattcttgtcatacgattgcttgacagcatgttgtgaatgcttgagccccgctcataccattcaaatataatggtttttcgcatgattcgttagcgttgacggatcccccaataaggaggtaatcatgtcagatcctcgcgttgaaggcggaagattgtcggtcgcgcccgaggccgtatatacgggtgctctggtgatgttcttcagcaatctcgctatgccggacaccgatccgcagggcaggcccatagtgctgtggttcaacggtatcatcgccgtctgcgccctgatctggggattggcggagacgatgcgcgtccgtaaggaatacccgtggcggtgggcgcgcacgctgttctacgacgtcctgattctcgtcgggctgctcatccgtaattccgattggacccggctcgtcgtgctggtcgcactggtgctatacgcgattgttacggagaaaacggcggcggaaccgcgccggtcctgactgcaagacgatgatgaaccgtcagcgtcacaggattctcgcggtatgcgcacggtggtcgacatcgacacggccgccggcagcgggcgcatgattatttcacgtcgcagacggtgaaggcgaagctggtgagggtgccggtggatttgccgtcggcgaggagctgattgatgtcgggcaggtccttgttgtcgctggtctggttgagggcgtattgggtgccgtcgggcgcggtgaagcgcatgacgggatcgcctttgctgttgtgcgtgcagctgacggtgccgtggtcgacggtgaggggccatgtgtggccgagctggtcggcgctgatgtcctgtgggttgctggtcgcggtgattttcttgctgccgttggtagggtagttttcggggtgttcgatgccgtccatgcaggcggtcagtcccagggccatgatggcggcgaggccggtggcggtgatggtttggatggcgtgtgtcgtgttggtcatgctggtttcctttgtcgtgttcggtggtggtcggggtgcttgttcgtctgccgtcaatgctggtcggggtgttcctcgatgaggaccatgtagccgtcctccaatgtggggtccatgggatgcgcgtcggcgggcggggtgtcggtgatgacgcggtagcgtacgccgcgtgcggtggtgacggcgttggcgacgatcatgccggccggtggcggggtgttggatggctgggtgagccagacacggcccgtggcgtgttcggtgaggtgttcggtcggcccgtcgtagcggatgcggccttggcgcaggacgaacacgtatgggcaagtctgggcgatgtcgtcgaggatgtgggtggacaggatcacggtgcggtcgccgccgaggccggcgagcagcgtgcg

SEQ ID NO: 3099 - DNA, 81122 bp, Unknown
  R215_18m  MAG No. k141_6939
cacttactccgcaccgctgtacgtgaacgccgaattcgagaacggcgacaccggcgagatcaagtcccagaccgtgttcatgggcgacttcccgctgcagaccccgcacggcaccttcatcatcggcggcaccgagcgagtcatcgtctcccagctcgtgcgttccccgggcgtctacttcgaccgccagcaggatcgcacctccgataaggaagtcttcggcgcgaagatcatcccgagccgcggtgcatggctcgagttcgagatcgacaagaaggaccagccgcaggtgcgcgtggaccgcaagcgcaagcagtccgccatcgtgttcctcatggccatcggcatgaccaagtccgagatcgcccaggccttcaaggactacccgctggtgctcgacgccctggagaaggaaaccctcgagacccaggacgaggccctcgtcgatctctaccgcaagattcgtccggccgacaccccgacccccgaggccggcaagaacctgctggacacctgctactacaacaccaagcgctacgatctggcccgcgtcggccgctacaagatcaaccgcaagctgggtgtcgaggccgatttcaacgaccgttccctccaccaggaagacatcatcgccacgatcaagtatctggtggccctgcacgacggtgcggcgaccttcccgggcaagcgcaacggcgaagacgttgacctgcgcgtggacgtcgacgatatcgatcacttcggcaaccgtcgtatccgccaagtcggcgagctgatccagaaccagctgcgtaccggtctgagccgtatggagcgcgtggtgcgcgagcgcatgaccactcaggacgccgaggccatcaccccgcagtccctgatcaacatccgcccggtgaacgccaccatcaaggagttcttcggcacttcccagctctcccagttcatggatcagaacaacccactgtccggtgtgacgaacaagcgtcgtctttccgcactgggccccggcggtctgtcccgcgaccgcgcctccatggaagtgcgcgacgtgcacccgtcccacttcggccgtatgtgcccgatcgagtctcctgaaggcccgaacatcggtctgatcggctccctggcgaccttcggccgcgtcaacccgttcggcttcatcgagaccccgtaccgcaaggtcgtcaacggccacgtgaccgacgaggtcgagtacatgaccgctgaccgtgatctcgaccacgtcatcgcccaggccaaccaggagcttgacgagaacggcaacttcgtctccaagtccgcccttgcccgagtcggcgaggaagaggcagtcgatgtgccggtgagctccgtggattacatggacgtctccccgcgtcagatggtctccctcggtgcctccctgattccgttcctggagcatgatgagggccaccgtgcactgatgggtaccaacatgcagcgtcaggcagtgccgctgatcgaatccgagcgcccactggtgggcaccggctccgaatggcgcgccgccaacgattccggcgacgtcatcaagtccgagaaggacggtgtggtcacctacgtgtccgccgacctgattcgcgtgatgaacgacgacggcaccaccagctcctacaagctggccaagttccagcgttccaaccagaccacctgctacaaccagcgcccgatcatccatgatggcgagcgtgtggaggccggctcggtgctggccgatggtcctgccatccagaagggcgacctggccctgggcaagaacctgctcatcgccttcatgccgtggaacggctacaactacgaggatgctgtgatcatctcccagcgcctcgtgcaggacgacaccctctcctccatccacatcgaggagtacgagatcgacgcccgcgaaaccaagctgggcgccgaagagatcacccgcgacttgccgaacgtcggcgaggacgctgtggccaacctcgacgagcgcggcatcatccgcatcggcgccgaggtcgaggccggcgacatcctggtcggtaaggtcaccccgaagggcgagaccgagctgaccccggaggagcgcctgctgcgcgccatcttcggcgagaagtcccgcgaggtgcgcgacacctccctgcgcgtgcctcacggcgagaccggtaccgtcatcggcgtcaaggagatcacccgcgaggatgccgaggaggacggcgacgagctgcccaacggcgtcaaccagatgatccgcgtctacatcgcccagcaccgtaagatcacggtgggcgacaagctctccggccgccacggcaacaagggctgcatctcccgcatcctgccggaagaggatatgccgttccttgccgacggtactccggtcgacatcatgttgaacccgctgggtgtgccttcccgaatgaacctcggtcaggtgctcgaactgcacctcggctggatcgcccactccggttgggacatctctttggatccgaatctggaagccgagtggaagaagctgattccgtccggtgccgagaaggccgagccgaacaccccggtcgccaccccggtgttcgacggtgtcaagcccgaggtcctgaagggcctgctgtccactacgctgccgaaccgcgacggcgaccgtctggtcggccccgacggcaaggccaccctgttcgatggtcgtaccggtgagccgtacaccaagccgatttccgttggctacatgtacatgctgaagctgcaccacctggtcgacgacaagattcacgcccgctccaccggcccgtactccatgatcacccagcagccgctcggtggtaaggcccagttcggtggccagcgcttcggcgagatggaggtgtgggcccttgaggcctacggtgccgcctacacgctgcacgagatgatgaccaccaagtccgatgacgtcgacggccgcgtgcgcgtctacggtgccatcgtcaagggcgataacctgccgccggcaggtatccctgagtcgttcaaggtgctcctgaaggaaatgcagtccctgtccctgaacgtcgaagtgctcaacgccgaaggcgtggccatcgacatgaaggacgaggacgacgatccggccagctccgctgacgacctcggcttcaacattggcgcccgccccgacgcggccgccaaggaagaccagaaggccgaagagcccgaataccagtgatccctcgggctgcatgcggtcaatacgccgcgtgtagctccgccaacgtgaaataaataacgtacagagacctttccggtttgcactacccctcagtcagccttggctgacagctcccctgacaaggggagcttgggaaggtctcaagaacagaaacggattaacaagtgctggacgtcaacgcatttgacaagattcgcatcggccttgccaccgccgatgacatccgtggttggagccacggtgaggtcaagaagcctgaaaccatcaactaccgtacgctgaagcctgagaaggacggtctgttcggcgaacagatcttcggcccgacccgtgactgggagtgcgcctgcggcaagtacaagcgcgtgcgtttcaagggcatcgtctgcgagcgatgcggcgtcgaagtgacccgcagccgcgtgcgccgtgagcgcatgggccacatcgagctcgccgccccggtgacgcacatctggttcttcaaaggtgtgccttcccgcctcggctacctgctgaacgtcaccccgaaggatctggagcgcgtgatctacttcgcctcctacatggtcaccgaggtgaacgaggacgagcgccacaacgatctgcccggcctgcaggacgagttcgattccgagatcaagcgccttgagcagcgccgtgactccgacatcgaagcccgcgccaagaaggtcgaagaggatctcgccgcccttgaggaggccggcgaggccaagggcccggcccgcaccaagctgcgtaacggtgccgagcgcgatatggccgccatccgcacccgctacaacgaccagatcgcccgtgtggacgccgtcttcgacaagttcaagaagctcaagcccggcgacatggtcgacgacgtggacctgtggcgcgagatgcaggaccgctacggcgattacttcgacggctgcatgggcgccgaagccatcaagaagcgcctgcagtcccttgacctggagaccatctccaaggaactgcgcgaggagatcaaggacgcttccgaacagcgtaagaccaaggccctgaagcgtctcaaggtcgtcaacgccttcctgaccaccggcaacaagccggaggccatggtgcttgacgtgatcccggtcatcccgccggacctgcgcccgatggtccagctcgacggtggccgctttgccacctccgacctcaacgacctgtatcgccgtgtgatcaaccgtaacaaccgtctgaagcgactgatcgagctcggcgcccctgaaatcatgctcaacaacgagaagcgcatgctccaggaagccgtagactccctgttcgacaacggccgtcgtggtcgcccggtcaccggtgcctccaaccgtccgctgaagtccctgtccgacatgctcaagggtaagcagggtcgtttccgtcagaacctgctcggtaagcgagtcgactactccggccgttccgtgatcgtggtcggcccgtccctgcgcatgcaccagtgcggtctgccgaagccgatggccctcgagctgttcaagccgttcgtcatcaagcgcctcgtggacctgaactacgcgcagaacatgaagtccgccaagcgtctcgtggaccgcggcgacgccgaagtgtggggcgtgctcgaggaggtcatctccgagcaccccgtgctgctcaaccgtgcacctactctgcaccgtctgggtattcaggcattcgagccgatcctggtggaaggcaaggccatccacctgccgccgctggcctgcgccgccttcaacgccgacttcgatggtgaccagatggcagtccacctgcccctgtccgccgaagcccaggccgaggcccgctcgctgatgatggcttccgacaacatcctgaagccggctgacggtcacaccgtgaccatgccgtcccaggacatgatcctcggtctgtactacctgtccaccgtgctggaaggcgccaagggccagggccgcgtgttctcctcgctggaagaggccgaaatggccctcgaccgccacgagatcgacatgcaggccaaggtgctcatccgcctgcccgagagcttcgtactgccgaagaactgggagcccggcgaggtcaaggtgctcgacccgcgcgaaggtgaggacgaggtcgtcaaggaagagcgcttccacgacggcaccgtgctgttcgccacctcctacggccgcatcctgttcaacgagactctgccgaccgactacccgttcgtcaacgagcaggtggccaagggccgtctgtccaagatcgtcgacgacatcgccatgcgttactccacccagcaggtggccgccacgctggatgccctgaaggatcttggcttcacccgcgcaccgtggtccggtgtgtccttcgcgttctccgacgtgaacgagccgcccgagcgcgacgagaagatcgccgagtacgaggccaaggccgacaaggtcaacgccaactacgagatgggtctgctgaccgaggaagctcgccgtcaggaactcatcgacctgtggaccgaatgcaccgccgaggtgtccaaggaagtcgaggagaagttcgacccgacctccaacctggccatcatcgtgcagtccggtgcacgaggcaacatgatgcagatcaaccagatcgcaggtatgcgaggcctcgtggccaacccgaagggcgagatcattcctcgtcctgtgaagtccaactaccgcgacggcctgtccgtgctggagtacttcatctcccagcacggtgcacgtaagggtctggccgataccgcactgcgtaccgcagaatccggttacctgacccgtcgtctggtcgacgtctcccaggatgtcatcgtgcgcgaagaggactgcggcaccaaggccggtctgcccatccgcgtcgccgagcgcgacaacgacggcaacctggtgctcgtcaaggccgccgacggtggcccgtactcccgtctgctcgccgccgacgtcatcgacccggccgacggacagaccgtgctgtacaagcgcgacgacgccctgtccatggacgtgctcaacgacctcgtggcccacggtgtcgaggaagtcaagtgccgttccgtgctgacctgcgagtccaagcgcggcgtgtgcgccaagtgctacggctggtccctggccaccaacaagctggtcgatgtcggcgagaccgtcggtatcgtcgccgcccagtccatcggtgagcctggtacccagctgacgctgcgttccttccactccggcggtgtggccgcggcctccgatatcacccagggtcttccccgtgtcaccgagcttttcgaggcgcgtaccccgaagggcgaggcgccgatcaccgagttcgccggcagcatcaagatcgtggagaacgatcgcggccgccagatcatcctgaccccggacgccgactccggcgcgccgaaggaagacggcgtgatcaagccgatcacctaccaggtctccaagcgcgtgccgctcaaggttgccgacggcgaccacatcaaggtcggcacccagctggtcgaaggttccgtggatcccaagaagatcctcaccatcctcggcaagcgcgccgcccaggtcaacatcgtggaggaagtgcacaccgtgtaccgctcccagggcgtggatatccacgacaagcacatcgaggtcatcgtgcatcagatgacccgtcgcgtgaccatcatcgactccggcgacaccgacctgctgccgggtgagctggtggacaacgcccgcttccgcgagatcaaccgcaacatcgtcaagaacggtggccgtccggccgtcggtcgtccggcgcttatgggcatcaccaaggcgtctctggccaccgactcctggctgtccgccgcgtccttccaggagaccacccgcgtgctcaccgaagccgcgctctccgagaaggtcgatgacctcaagggcctcaaggagaacgtcatcatcggtaagctcatcccggccggtacgggcctcgcccgctaccgcaacgccgtggtcgagcccgacaaggccatccgcgacaccatctacccgaacttcggtctgggcggcgatggcgatctcggcgacgcgagcttctccgatgccgacctgtccgacctgaacttctcgaatctcgagttcggcgatctgaagctcggcgacgacttcaacccggatgatttctactccgatcagggcggtcagcctgacatcgaggagtaagcgagagggtcctagaaaggatgtcctttctaggacccagatcttgcgttaatcgcaataagatggcccggaactatatcagttccgggccatccgtatatttgccattgtgattttcctgttgaacaagagcaggcagccgctcgttgcttgattactcaggcctgtttttcggtgaactggaagaactgatcaccaatacgcaccgttgaaggtgcactgagcttgagcgttgtgcccttggtgacttgggtctcctggccattggtgatgatgtaggtgccgttcaacgagccgtagtcctcgatccacagcgcgccatcggtgtcgacgctgatggcggcatggttgcgggacgtggtgcgggtcgggtcttcgatatgctccgccttggcaccttgcggcacatccatggaaggcttgcggcccagcaacgtgctcttatcgatcacaatggtctggccggtgacatcgttatgcatcaggtacgtcttcttcggtgccttggacgtgaacgaggaggagagcacggtgccgtcccaatcctcgatgtcgttttcggcggcgtgcggtgtggtgtctgccgaagcggtggcagcgggctcagcggcggcggtagcggcagtggcggcaggctctgccgcaaaagcggtattggccgcggtttccgcagagctgggctgcccatagtcgttctgcggttcggctgtgccaactgcggaatccggggtgccttccaccggatcgtcggaataccaacccagttcaggtgctggagggtagggaagtttggccatgatgatgccgtcctttcactgacgaaaagccagagcggcgttgattgccgggtcgccgagctggcccagccattcgatcagtgccggataggtgttgggattacgtgcgatgcaggcgcgtagttcaggcgcgtactgggcaatctgggcgattagcatctggtcggtggtggtcagggcctgttcggcggtgaagccataaggattggtggccacaggctcctcgaatgccgcctgagctgcgggctgctgggccgcgtactggtcggcagcgggctgggctgcggcgtactggtcggcggcgtaagcgtctgcaggctgctgctcggcagcctgcagggccgcctgttccggagcctcctgatcctgaaccgggccgccgaatgcgtcggcggtgaacccgtactgtgccagggtttcgcgggcacgctcatcgccgaattcggcgatccaacgcttcaagccggggtagcaacgcggatttacggcgacgtttgcgccgaattccggattctcgtaggcgatttttgccaacagaatcgggtccgcgttcggatcctgtacggcagcgaccgcagcatcataatcaaccatgggattacctccttatgctcgctcggttatgccgaacgtatggtccgtagtgtttgcaatgttgcgtcttcaatggcgccaatgtcctcgccctcgtccagtctaaaagcgctgaacgcgtgatgttcgggttcggtcagtggcatatcggccacaatcacagtgatattgtcggttccgcccgcatcgagcgcggccgccaccaaggcgtccacggcttcctgcggactggaatgcgctgcggcgatggccgcaatctgttcgtctgacacttcaccgtgcaatccatccgaacagatgatgaaacggccggtcagatcggcaacatatacgtcgggcactatgccgtccggatcgcccaggcattgggtgatgatgttgcgtggaatggtcgcctccgcctcttccggcagcatctgaccggaatcgatagcctcctggcgttgggaatgatcccgcgtgatgcgggtcagcgaggaggcgtcccacacggggatgatatccgtggcgggggcatcggcatccggcagcgggctgagatggtaggttcgggaatcgccgacattgaccacataggtctggtccgagaaatccggggagtcggcgtcgtcaaacggagctgcgctgtgggcattgatggcatctgcgtaaggctggggcaaaaccaggccggagcaggtcgtaccggccacgccgccgagacggtcacccaaatcaagaatgtcgtgctgagcctgtgccagggtgtcgtcgatgtcatggcgggtgcgcgagggcatggaagccagctgcgcgaaatgctgggcagccaactggcttgcctgctcgccgcctttgccgccgcccatgccgtcgcagaccatgaacacgccctgttgggcgaatccggtgtcttggttgttcttgcgcctaagacccacgtcactggtcatcgcgatacggatggagcctgtggtcatgacgtcttccccttcttacgcttgtgcttgactcgcgctgtatacggctttgctgcgtgtctatttgccaatatagacacgcttttcagcgaaagccgtgtacatatcctcctgaaacgcggcaaagaagcgagcattgccttgcgcaaccggtcgactccattccaatatgtggtggcttggcccgatgcaatgtcttgccccgagaacgtggcgtagtcggcttcccgaccgagttgaatcagtgcctgatcgtccgtgccgagctgactggcgattgcgccggcctgatcgcgacgagtgcccttggctgtgatgccgctttgctcggcaagtatgtgtatggcattccaccccgctgccacacgggctttcggactgccgtgccgtcgtgcacgtgccagcaatgcagctttaaatatcaggattagtccgcaaacgatgagcagagtccacagggggcttccatagatggctaccgcacgagtaactcgccagaaccgcacccagaacaggttggtcggcgaatcatcggcgtcggcgccggccaatgagctttggcccctggcttgcgtctgatcgcgcagcggatcggtcaacggcaccggtggttgccggaccagcgtctgcggattcggcggcgtcaggttctggttttcatcaggcaccttggtctccttgggcgtcggatagaacgccacccatcccaggccctgcaatttgatttccacccaagcggtgacatcgttgccggtgaattcgattttggtgccattgcccgaggtcttctccgtgcgggcatcggtgatttcgccatcctcgtttttcggcaggaagcccagaaccacacgggagggcagtcccagctcacgagccatcagtgccatggcggaggcatattgctcggagtcgcccaccatggccgtgcctgccagcagcttgttgatacggtagttgccatggccggcatcggagggataatcgccttcgagtccatgagagaaccatccggagtctttcaatgtgtcggccaacgccgtggctgcggcaccgcccgaggactgtccgccggcaatggacgtggccagtttgctggccgaatcgggaacatcctgggcttccggttgggtgatgcgggccgcggccgcactgctgatctgcttatcggtgggcttgcgggcgataatgccggattcggtataggtgaggcttttacgcgtgccggcgggaataatggcggaatcggtatccgtgttgtagtagaacgtgtcattgccgttgtcggcatcgttggcgaagctcacgccagtggccgctcccgccagcggcagccaggtgtcggtcaatccctgatcgacggtgaaggtcgcagtgaaggattcgccctgctcatccgccttgatcgtggtgcccacgcgatgataattcgaggagtccgtggcttcggaagaatcggacaggttccatactgtgccgtcgaatcgatccatcaccgcaagtttgactggtgttccggccggcagattatggacggtcagcaacacgtcttttttgtggtccttgatataggatcgcatgccgctgagcgggctggtgtaatcgtaggggcttaacggcggatcgtagcggtcacgcagcacgaaacggtcctgcggcaccagcaacgtgcctccgaaagcaaggccggcagcgagcacgacgatgatcagcgcggatatccagcgcccccattccagcagttcaagacgccaagacagccagataatcagcagcaaggcaaaggcaatgccgcagatggcacgttgccagccgctgtccgtacccagcagagcacatacggccacggccgccgcaaggggcagcactcccaccagagacaaccatgcgttggcattaatggcaaacacgccggtgaggaacgtaagccacaggccgatggtccataccgccagcagcacgccgtcttgcgtgcccagaggcggatcgacggaaataatgtacttgaacgagccaaacgtcatttcccaacctgaactcaaggtcttcaaggtgggaatcacgtaatgggacgtggtggaactcagcgttaccaccggaccgatgatgaattgggcaaacgccagaaacacgatttgccaccacagtcgcaacgccggcaacatgcccgccagagcgatgatcgcgcccagcaaggtggccggtacggcggcgatcgcccaagtggccacgccgccgtacacgtcgatgagattggcttgcgccagcaacatcatcgccgctatgagtacgaggctggtgattcgtttgccccacggctggcgactgaggcccatgccgcgaagcacattgcctctggtcatccagataaccgaatgtgtggagtcggcccaggagccggtggtggtggaggttccggtgtacgtgccggaggaagtgccggtgtatgtgccgctcgatccggcgtacgcagcggtattggtattggtgatactggactggtcgaaggtcatgcgagcacccccatgatcagtgggagatcatcgagttcgccgatggtggccaatgtgaagttggcgaatcttctgatgccgcgattggcgccggcgctggcctgcaataccacgcagctggccgatcggggcaaggccaaggtcatgcgcttgatttgctcgatgtctttcagcgatccaacagtgaaaaaatagaacgaagcatcaggactgtgcttcagcgtgccctcggcgagattcggattgtcctcacgatcaggctctatggcactggcgttgtcgaggaactccatggcgttgcgcggctggccgtgcgcgttgcccgcgtgacagaacagcgggcgattctgcagcaggcatttgacgccgatggaggagtggatggacaccgccatctcgaattcctcgccgttgacgtactcatccgggttcacgctgatggtcaccgaggtgtcggtgcggcgcgtggcttcatattggcgaatcatcaacgtgccggttttcgcggagctcagccagtggacgttacgcacgtcgtcgcccggctcgtattcgcgcaatccgtagaagtcgagatcatcatccacgatctggccggatggttggccttccagatcgcggggcacgccggcattcagggtatcgagacgcacggtacgagggtggatgaatacggtgatgcggtcggccagctccttttcgtgacgtaccaggccgaacgggtctcccttgcggatgcgcaatggtccgatgggcagtattgcgcgcgataccgtacggaactccacatcggtttgcttggattgcccgggagccagcatggggatgttgaatcgttcatgcgcatcgccgattggcagatatccgcgtgccgtggttgtcggcgttttgccggtgttgtcgatgccgacgataacggatatggtgtctcccacggtcacgcgatgatcggatacggcgatggacgcgtggaagcgtgtgttgccgagggaaagcgcgattgccgcgagcatcatcaccatcgccacgatgccgaatacgagcagctcataccagcccagaggcaggaacgcaataagacatgcgatgcctgcgcccgttaccgcccagcccaagggcgagacgtaggatgcgaagaaccgtctgatgcgtcttaccgcgcgcttgaacatgcgttcagcgcgccggcgacggcgtaatgcggcggatgtagatgccatggtcggatacctttccaggccctatcaggaaccgatggtgggggagggaacgtcttcgagcacctgtgcgatcaggctttccggagtcgcgccatcgaaggtggcttccggagtcagcgtgatacggtgtgcgagcacggccactgcaaggtccttgacgtcatccggcaccacgtaggcacggccatcggccgcggcccagatacgggcgcatcgggtcagcgccaaagcgccacgcatggaggagccgactgtgatcttctcgttgtggcgggtcgcctcgacgagcctgacgatgtattcacgaatcgcatcatccacatagatttcggtggccacctgacgcagccgcatgacatcgtcaccgctcagcaccggggaaatggtctgcgcacggtcggtgatatcgacctgcttgaggatatcgacggacacatcatggcccgggtagccaatcgacgtcttgataaggaatcggtccatctgcgcctcaggcagcctataggtaccgagctgctcgatggggttctgggttgcgatcacgatgaacggctgcggtacatcatgggtgacgccgtcaacggtgactttctgctcttccataacctccagaagtgcggactgcgtcttcggcgatgcacggttgatttcatcggccagcacgatggaggcgaaaatcgggccctcgcggaactcgaattctccgcgcttctgatcgtagaaagtcacacccaccacatccgaaggcagcagatcaggcgtgaactgaatacgcttgaaaccggtggaaatggagttggccaagcctcgggccaactgggtcttaccggtgccggggttgtcttcaagcagaatatggccaccgaccatcagtgcggtgacgcattgcttgatgggaatggtcttgccgataaccaccttggagacattctcgaccagcgcattgaaggactgctggaaatcccggacctgagccgtgggctggggcagtagtccggaattgatgctggcgggcagtgccgatgcggctgcttgcgcggctttgctcgactgacgctgcggctgggattgcggctgggattgcgcggcggcctgctgattggctaccggcccgcgaccagccacggtttcggcgttggaggctgcggtcttgccggcggttgtggtcgtccattgacgggaggtctgggtggcgggggcagcattcgcagtagcggcctgcttgccggatttacgtccgaagtgcggaagcgcgactttgggcgtgctggtctttgccggcatgccgacctgctgcgggatggctggcgtcgcgtccttgcgcggcttgagcacggtgctgtcatcgcccgcaggaatggaggcggcatcagtagtaggagacggcttttctgacgacgcttgtgacggccgctgcggcaggttaggcaacgcaacgggttgctgtgccgtctcggtgttcggggtggtgccagtgtgcggttccgatgccagatgtgtggcatcggacaagtgcgtggcgtcggatagctgcgtgctgtcagacagctgcgtcgcgtcgtcgatgttctcgctcatggatgttctcctactgcttgtgaatggtggttgacgatattggggtattaccgaaaccaagaatccaagggttcttggccaaagtggtgacatcggtaccggatttgagcgactcggtcccctccgaggaatcagaggggcgtgtgcccgcgacgctgctgccgtccgccgtattgtcgagaccggagtatcccggcccgccggtgactttgacgctccacgtgtagttgccatcggcggccacggccaagtcggtgacgtccaatggctggccggggttccacgtgaacggttggccattgatgatgatttgtacggtggcctgcttgccatagacctcaaccgaaccgccggtgacgttaatgacgtgagcgttgtctgaccagcgcagctcctgcggtttgttgattacagccttcttctcataggtgtaaggagcgccattgtacgggcctccggtggcggcatcgctggtagcgccgttgaacacctgttgcaccgatgcggtattgcatttggcccaaggactcattcggaagtcgagtgagttccggttagtagctgtaccggaatcgatgccatcggcagtcacgttgtaggactgcgcatgcccctgcttggtccaatgcacggtgcatgtactgccggatccggtggtgtagacgtcagtgggcggctggaccttgtactgcgggacaaacctgctcttgcctgtgccggcggaagcatcgcgctgcggcaccacggtggccgttacggtgatttcctgggtgttcaaatcgttctcattgatatcgaacgtagcgccactgtcactgcaatcgatggtgtccttgatgtctcctcccaaggaaattcgccggcagccggcattgcggttgttgccgagagtgactttcgccgttcctgtggtgtcgtcgttcgacagcgcaatggtcggcgcatccgggtctccccagatgtcctttggctgtgatgaggcggactcggcactccaattgattttgttatgggctttgacggtcgccgtaatggcggtgccatcggaaatgtcgttgttgttgaacgtaaacgacagctcggtggccgtgttgccggtttccttggtctgcggagcacctgcaccggtgacggtcaccgaatagttgtcgacggcgctgaaatcaccgctcggcgctttccacgtcactttggcggttttattgccacctgtgaccgtgacatcggtgggagcggacggcaccttgtccggtgtggcttcgacggtggtggacggtttggaccaaccgacgtcatttcgcgcggcgacggtgaaggaataggttttgccgttcttcagacccgtgacctggcatgaggtgacggcaccgcaatccttctctccagtggcggcgccggtccaactgaccttgtagttggtgatcgggctgccattggcggcaccgggcgtccatgtgaggctgaccgcgctgtcctgcggttccccggctacgggggagagcagtggcggctcgggcttgtcgatcacggacacggtaatcgatgcggtgacttcacgatccttggacttgctgccgtcttgcacggtgacgagcacggtgttcgtggaagcacccggatcggatgcgacggcgatggtgacgtttccggaggcatcgcatccggcgatagtgagtttggcggcgtcatccgccttgcagctgatgacggtcagcgaggaatcggggaacggattgtacgcgccggtaagcacgttcacggcatcgctggcaccggccttgatcttcagcgtcttgtcgccgacgcgtgccagcggacgggtggaagacactacgcgcacggtcacaccggcattcacggtgcccgcgccgtatgcgatttgcacgggaatggacgcggtggtgccaggagcggcatccttggtggcggaaacctgcaagctgccggaacgggacaggttagcggtgattcgcccggacgatgagcttccgccggaatacgtgtattgcttctcgtcgtcatacacgccggacggtgcatgggtgagcgccgtcagatcaacggtcttgggggccgcgcccgcctcgacatcaatagtggaggacgagaacgtgggcggcggcacatcgcggcctatcaccgtgatctggagagtgatcactgcggaattgatgatcttggtcttatccgatccctgcttgccatccacagcggtaaaggtaatggaggcggggcctgcgtagtcttttgccgcagtgaacttcagggtcttgtcgttcacgtagaaatcggagttggaagccttggtggcgctgacggaatcagcgctttcgatatacggttccttgccggcaccgacgcgaacatagtcattgatgttgatttcaatggtctcacgcgaattgaccttcaattccggtgccttgggacgcaacgtgggcggaaagacaccataggccggtacctggatgaacgcggtggaggtgatgttgtatttcgtattggtcaccgtgtaaggcacggctcgcgcctgtgacgtcaggtcgacggtgatggtggtcgaatgctcgccgcccttgacgtgagcgtgagcgctggcggagggatgcacgccgaccttgagctcattggctgtgccggaaggattggcgatccactgggaaacatccacatccacggacttcttatcgatggtggcggcggacggcacacgatagtcgtaggcggtaggcggctcgatggcggcattcggatccacgtttaccgtgagggtggccgtatcggacaagccggccttgtctttgaccgtgtaggcgatataggcggtggtggcgctgccgggcgtggtgaaggagatcatgttgtctttcacgctcaccccgtcgagaccttggacctcgacatgcttgtcgacggtcagattggtgttgtcgccggagatgtcgttctgcgcgaccggcacggttgcggccgtattgggcctcaacgtgatttcgtcatccctggcgtatacgccggagtcggacgatccttggaatacgcccacgcggatctgcgcctgtgcgcgctgaccggtccaatcctccacggcataggaaaaggtgtcggtgccggacgaatccggatacgcttcatagaccaagtagtcggaaccgacttcggatatgcggcccagcgtgggtgccttgttgcccagacccaacagctgatcgtcgtcgccatccgtgtctatgccggtcagtgtgatggggatgcggaccttctgtccggcggcaacctgcgcttcggcgtcatgcggggttggcgcggccttgctcgctgcgtcgctcttatgcacggtaatggtgatattggcggaagccacattacccagattgtcttcaaccgtataggtgatggggaagttgccggtctcgctggatgcttggtagcggaccgtgtctccagagacgaaggccagacccttgaacgtctccttgtcgtattgcaggttgttcttgagtttgaccgtggtgccatccgagtaggccacatggtcaagcacatccacggacacgatgccgccggtgcgcacctgggcattgatattgctggccttgggcactgaattcgaggtggtcagagccggtggctgcaacacgatggtgcccttggcggttccggaggcgttggccacggtgtaggtaagggcgacgggtttcgtgggcacctgacgcgcagtgatatacacgcgcttatggctgacgagaccaaccttgatgccggagtcggccggtgcgctcaccgtggtgacggacagcacgccgcccatcggatcgacgtcattggtgagcggctccacaatggcggtattatccgcgccaagcagggcgacatcgttggcggcaaccggtttggcggcctcgccggtggcgggctgtacctcgacgcgagccaatccggtggccggaatcgagccttgagtaatggtgtagggcacataataggtgccgggattggtggccttgaacgtcaacgacatatccgccgcattggtggtcgtcgaagcgccgttgggcgtatccacctgagtcagctgtgccggctgcaaggaagtgccatgcacgtaagaggacagcttgacgacggtatccgtgttgggaacggtggttttcgctaccgggtcgatgaccgcggccaaggtgttcgcgggcttgaccgagaaatacaccatgccggtgccggtcgccgtgccatcggagacggtgacctcgacgcccacgcgtcccgacgccagcgcaccggtgttgaacgtaagctggccgtcggctcgggtggacacctgcacctggtcggtgttctgggccacagcggagaccagagtgagcgggtctccatccggatcgttgaagctgctcagcgcattggcggtataactggctccctgctccacatcgatctcgggaggagtgtcgaactgtacgggagcgtggttgcctccatcattcagggttacggtcaccgtggcggaagaggtctggccgcggccatcggaaatatcgtaagtaaaggtaacggtgcctgcggatgtggcggaggcatcgagttgcagataccggccgtcgtaaatcggcgaaatggtgacgtctttgttgtttggtgcgccaaccttggtgattttcagcacggaacaatcggtctgctcgtcattgcgcagcacgtcgagaatctgttccgaaccggctcgtgcgccgatttcatcatcctcggctttgatttggccggattgtgcggaacaggtcttggagaagtcgtggtggttgttggccgagtcgttgttctgctgttctttctcggtctgctcggcctgtattttgttccactgtattttgatgactttggtggaatcctcagggttccacacattgccgttaaccgtgtcgttgagcaccacaaggcgatggttggtgcggaacaccaattcggaagtggcattgacggattcgagggtttgcggcttgacgctggtatccgcgggggagcaggcgcgaatgtagttgctggccttctggctccaagccgagtacacgcagcccttggacgataccggtcgtgccggattcgccttgcccccgttggctatgaaattcgccttggcattggacttcaacgggataagcgtaaggcctctcggtgatgccgcggccacccaatcggactgtacgtcatcggtgggaggctcctgaagggtgagggtgccggtcgtgtcgacatcgacgcggccgcccttgaatatgacggttttgccggttgcgattaccggcgtgctcccgatgacggtaaagctttcaacggtctgctgcttgccgtcggtcagcgattcgagggttttggccttggcgctgctgggattgtcaagacgcagcaccataccgtcggatggacggtatccgtagaccttgccatcgtgggttactacgatgcgcccgccctcgcccagcttcattttcggatcggaagtggtgggggccacggaatcaaggttttccgacaagccggtccacacattgccggtcttctcgttgatcagggctacggtatccccgccgaccacagtggtggtgttggctttgatgtcagtcttgacaccggtgctgaccgtggatgccttgatggtggaggctttggtcgtttcggtcaggatggtgtcgccattatgctgcgcgatgtcgaatcgtggggcggaggaggagacgccggcgtcggcctccttgttctttacgttgaatcgtgcggccttctggttcttcagcgaagtgacccacacggtgccatcgtccagttgcacatggcggcgcgtgacggtgctcatgatcaccgcgccggcaacaagtcccagaagcagcaggagcgtgattacgggaaccgtccacgtatgccctccggagggcataaggcggcgcaaagccgcgctgatgcgtcggcgacgatcgtatgactgggacgatgtggccatctgaactccctgaaccctggtttctctggttgctagtgtaatgacaacgctttacggttccaatacctgccgttcctgttgtccatttggtgaattcgccactgccgggcgcatgcctgatgcgatacgcaatgccaaggtggtatgcccggcagtggcgagcggatcactcttgcggcttggccgcacaggcgatggcggggctgacggacatctggcggttcttgcgcacaatggacacctgaatgcaggtctgcgagccttcctgcgcgttgacggtcaccgtgggatctgacgttgtgacggtttgcgcgctctggtcggtattgctgccctgcactatggcccacgcataggtatcaccgctttgcgggtctggattcgtccaggtgaacgtcacggatgacccatccgccgcataggtgccgttcagattctccggggaaggaatctgggcgttcgcggtatcggtaatcacgtcatcctgattattgcggttgttgtcatcatccttggtgccgggcgtcgccacctgtttggtatctgatccggtggcgctgtccatgcggggaacgaccacgaaggcgaatatcagtgccgctgcggtgatcgccgcaagtataccgacggtaatacccaccggtttgacccatcgccgtgacgaacgggtggtctgatctcgctggtccgtggcccggcgccgacgctcgatgtctttggggtaggccggcatcccttccacggtaacgggagtggcatgcccgaaatatgcgaattgcacacgctgcatggcgcgtgcgaactccaacgcggagtagtaccgctggtcggggtccttgttcagggcccggcgcagcaccgcttccacatcggccggtacgtcggggcggttgaggcgaggcaatggctgattgacgatcagcgaaatcagttccgattgcgaacgtggatgatattcgtgctggaatggcgagcagccgacgaacatggcgtacagggtggccgccagtgaatagatgtcggcggcttccgaaccattggtcagatgctgaagcacttcaggcggtgcccacggcggcgagaatccggtttcggtacggtcatacacatcggtggagataccgaaatcacccagaacaggcaaaccctgcgaggtgatgagaatgttgctgggcttgatgtcgtgatggatgatattgctgcgatgcgcggtgaacagcgcgcttgacagcttgatgccgaggtcgagtacctgctcgcaggtcatggaccgggccttcatgatgctgttgtaggtgccgcccggcgcatattcgatgacaatgtagccatggccatcggaggtgacgccggcaccatataccggcagaatgtacgggtgggatgacagcttggccatgaagttggcctcgcggttgaacagggcagcggcccgtgggtcaagggttttggcgctgacctttaccgccaccgggcgtgcgggcatacgctggttatataggtacaccgtggcggtggcaccgcttcccaacatctggacgaaatcatatccgggcagcttcggcggcctcatcggaatattggccatctgttccctccctccttggaaaatgcgctctccctgcattcgttctacaggataccgtcaagggtacgattcttcgtcgggttcggtaaaatttttccctctgtgacggtcgggtttaggctggagccatgatgacgagacttgaacctggaacagtgctggacggcatcgaccgtgatggagcggcgaggctggttgtcggcacgcctggaagcggcaaaaccgaattcgccttatcggtgttgatggcggggctgcgccgctacggtggcacgcaggcggtgatggccgtatccggccgtgtggccgccgacgcattgggcaatcgggtgattcgtgagctcgggttttccgtgcaggccaggccggtcaccacgctgggtgccgtggcattccgggccatatcagcttcgcgcgagggaactggattgccgtcgcctcgattgttgaacggtgcggaacaggatgctttgctgcgtcaagtcatggccgtgcatctgcgccatgccgtagcgggagatgattgcggcacctgtgatttgctacgcgtctactttgcccaggatgactgggcgaaactcatacgcgatgccggtgccggcgagatgcccggctcggccgcttccgcacaatcaagcctctcgcaacaagggtcggattcgctgtctccgacgtcggcaggcggctcgaccagcgcggataggttcactcgcggtatttcagatgcgtttatcggccagttgcgcgatatgctggcccgattggacgagctcggtgtaggcgttcacgaagagccacgtctcttggacgccgtgatggaggacgcgcgattgtcggtgcaatggcgtttggctttcgcgttgcgccgtgaatatattgcagcccaaagcgcggcatatccggggcaataccgtttggatgcctcgtatttgctggtggcaggagctcgtgtggtgcatgaggcattcgccgccgatcacgcggatgattccgaccggcctatgcgtatggaggcgttgggcttgccccggctgctggttgtggatgatgttcaagacaccacgctggccggcatgcgcttcttggaggagttggggaatgccggcgtcaagttggtgctggtcggcaacccggatgaatcggtgcagaccttccgtggatcgtatccggaatatctgatgcgccgtgccgtggaagggtggctgaaagccaaggaagaacagctggttggcggcagtaccggcgctgatcagtcgcacatgacgatggctgatgtgatcgcgtctcgtatttcgctgtcgattccctcgccggaagacgagccgctgcctccggccgagcgtcccggcaagctgaccgccatactgggcggagtcgatgcagcgaattatcagtcggacggcacggtgaccgccggcctgtaccgatcctcacgtgaggagctggatgatgtggtctggcgcatcaagcggacgcatcttgaccggcatattcggtggaacgacatggcggtcatcacccacgacaatgccgccgtgcggctgttcggcgaacgactgcgccgagatggcgtgccggtgcggtattcgtcggtcacccgtcctttgaaggacgagactttcgtgcagggattgttcgcgcttgtggagcttgcccgattgcgtgccgagggaatggcggaatgccagatgacgttggcttcctgcgcggcatatataaggactagagtggccacgttgatgaacggcccgttggtgagtgccgggggcagacccggtcaagggcgtcccgcaaggcttgcgccgatcgaatcggccatggggtcgttggagtcgctggcgcatctcgccacggatgatgccatgctgacctctctgacgacggcatgggagacattgcgtgaaacataccatgaaacatggcgtgaaacaggtcgtgaaacatcctcatcaatggttccatcgccagtgtctgtcgaaatactcggtgaaccctccgacgatgacttggcctttggcgttgacgcgctatacgtgatgcttgccgttgatgatgccgccgcgccggcgcaggctgcgcttgcatccatccatgcggtgcttggcaacgaccctcaggcccgcgcttttgcgaacctgtggcatctggtgggcagcgttgcttccggcttggagcggctgccggcaagccagcgcgtacagccgcgttatgcactgtctgttgcctggaacgccaccggtctggcaccggtctggcagcgtgcggcattattcaacacggcagaggggcgcacggccaatgaccggctggacgcggcaatgcgcctgttccagttcgccgatgattccaccgccagccgagacatcacgtcattcatggcacaggttcggggcatggaagtgcaggccgattccttggcccacatagggccggtggaagacgctgtgacattgaccacgccggcaggcgcggccggacgccactggggatatgcgtggataccggtggtccagcaagacgtgtggccgaacctcgccgggcgcaacaccatgttcggtggtgaagaccttgccgagctcgtgctgaggggagcacttgaagaaagcgacaaaaccgggcatgatccgcagttcgcggctgtgctgtcgggcgagaagaagggtttcctggtcgcgctgacccgtgcacggcgaatcatgatcagcgcggtatggaacgacagcatgagcccctcggactttcttttcgggtatctgccggaatactatccgcgcaaccggcaacaggcgcctttcaccacagtgggggcgcatacaggatccgccgaatatgatctggccggattggacgccgacccacgtgggttggtcagcgccgcccgcgcggttctggccactgctcaaccgcagcaggctgccgcaaaggacgccgcggttgcgttgacactcctgtcggagcatggtgtgcgcgccgcaaatccgcagagctgggcgttcgtggaatcgccggcccaatcggatagcgcgtcatctggcggtgcgtcatctggcggtgcgtcatctggcggtgtacagtctgacggtatccaaacggggaaaggcaagacggatgcgcaggccgcacccatggtcaccctgtctccatcggcggtcgacagcctatgggcatgtccggtgtgctggatgctggagaaccggttcgccggtcctcgccccagctccgtggccaccagcttcggaaccctcatccatgcggttgcacagcaaggcagcgaggaagggctggaccatctttcccacaatgcccagacgttggccacactgggcttggactccacggccggcacggaacgccgcatcgaggctgtcacggcacggcttaatgccatctatcagagcaaacgccccgatccgaatgccatagccgacacccggaaccgctatgaggccacccgtaaggacgagtccgcggcagatgccctgcgcaacatcgccgattactttgtgcgcagcgacgccgatccggaaacgtatcttggcaagaactccagcaacttcagcattggcgcattggccggtgccgaatgcgaacgggagtttgccgcacgattcgatgtgcgtgacatactcgacgcatacaatgccgtgcccggcatgcacccgatcgatcggaacatgctggtacgtctgatgggagcactggtcggagggtggccggaaggcatggacgagcatctgaccgtgagactgtccgggcgcatcgaccgtatggaaacccgcgtactcgcagacggcggcgaatgcattcgcctcattgactacaaaacaggcagaacgcccacggtcaaacagattttcaatgatctgcagctcgtgtgctatcagcttggcctcgtgttccccgaagacgggccgcgcggtgccaaggcacttgccgcaatgccgcatatcagccaaagcgcgctgttccatgtcgggcagaatgcggcaccagccagaagctacgccccggaaggtgccttccagccgccgctgttcactgatggttcgttgaatgccgaaccgttcacgccacgatactggtataaagaccccaaccgtttcttcgacatacccgccatagatccggctactcctcccgaaggtgtgagtgccgaagcgtgggcgcaattcgccgcgctcgccggtacgcagacgttatggtcgctgaccatgatcgcccgcgtattctatgccgcggcggccagcaggtcggccatcatcgaggcccatccgcaagacacccatatcggattctgccgtatgaagaacgtctgccctgcctgtgcgggccagatcgacacgattttcgaaacgaggcaagcatgagcacgttcactcccagtgcggaacaggccgccatcatcgatgcgccagtcgatgctgacgtactggtggttgccggtgccggttccggcaaaacctttacgatgacccaacgcatcatcgcgcttatcaatcgaggtgtggcacctgaacgcatccttggcctgaccttcacacgcaaggccgcaggcgaactgctggaacgcgtctccgccgcagtggccggtgatatggcgggctctacgaccgccacggtgtctgatcgggcattcctcaagccggccattttcacgtatgacgccttcttccagaccatcgtgcgccaatatggactgcttgtcggattcgatcagaacacgcaaccattgagcgcagccggagcgcttcaactggccaccgaagtcatcgacagtcacatggatctggcgttcagtgaggattttggcgccttctccagtttggcgaaccgtgttctggcgttgtcggatgccattggcagtgccatgatcggtgccggctgcaccagcttcgatgatgcgatcaatcaagtacggcaatgggattcggcattcatcaatcgattgcagcaagccgtcgcagacgaacccatgcccgaggacgagccgaaaatccccaagatcaaacgactgaagaaagataccgacgccagctggcaagccaagctcgatgaccgtgccgaacatttgcacgcccgctgcgcctatcattgcggtgcgctgctggagaccacacgcaaacgcgatattctgctccagctggtggaggcctatgcccaagccaagcgggaacgcaatatggccgaattctccgacttcaccattgccgcgtatcagcttatcgagcgcttcccctccatcggagagcgcacgcgccgcaggtacagccatgtgctgctcgacgaatatcaggacacctccaccacgcaggccgctctgctggcggcactgttccatgtggatgcgtcacggaggtccgccgtcaacgcggtgggtgatccgttccagtcgatttacgcatggcgtggtgccagccctggtgcattccgtatgttccagcaggatttccacctgcctgccggatacaagccattcccgttgtccgtcaccaggcgcaacagccgtatagtgctcgaagccgccaataatctcacgctgccgttgcgctccaatccgtcgcgtccctccagctcattgatgcgtgaggtcgatgtctcatcgctcgaccccatgcctgatgcccccgaaggaacattgggagtactgggcttcgccacggccgggcaggagatcgacgccgtagtgcgtttctgcaagacggccatcgcacggcaccgttccgcagccgaacaacaggaacagatgccgggcgaacagaaagcgccggtcgccgtgctgtttcggtccaaatcacatatgcccggatatcaggcggcattggaacaggccggattgaccacattcgtggtcggctattccgcgctgctggaacgtccggaaatccgcgatctgatggcgttgctgcacgtggccgccgaccacaccgatacgggatcgctgatgcgcttgctggccacgccacgattcaccatgtccgcagcggatttgaccatgttgtcccgttttgctgaagaacagaacatggaacaacgcttccaagcattggtgcaggccggccttgcccaaccggatacaccagcgaatgaatgggcggctgtggtgcgtgagtaccgcgatcaggtggccaatgcggtattcctgccagacgtattgctacgcggcgacctggtaaaactgcttgaacggttgagcgcacacgggcgcaacgccataacccgggccgcggtgatgctccgtcaggtgcatgatgccgtcgggcggccactgggcgacgtgattcgcgccggcatagaagcgttggatcttgacatcgacaccgtattggccggtgtgctgcataatccgcagcaccgcgccaatcccgctttggcgcatatgcctatggatgcgattgtggatttggtggatacgtacacgcaagagattgccgctgagcaaactccctcgttgcatgggttcatcacatgggtggatcatctggcttcggtggaggatgaagccgccagtctccccgacgctccggtggatgtggaactgatgaccgtacaccagtccaaagggttggaatgggatgccgttgcggtagtggggcttaccgccggcggattccccagcaatcagggcgaccatctcaagatcgtgctggacgaacaccatacgggaggcaccgagcaaggtcactggaccgcacccgaatatcatgagaccgccgactcctggctcaccaaccccaccgccgtgcccgtgcctatgcgcgccgatgccggcattttgccgcgattcccccatgatgccgatgtggaagccgaccccatcgcatcgttggcggctttggatgatgtggagcttatcgatgatgaagtgttcggctccatgcgcgaattcggcgatggcgtggaagaagtggatgcatccggctggtatttgacgcaggcggaggaatatgggcgccggctgcatgccgacgaacgtcgattgatgtatgtggcgcttacccgtgcacgggaagatgccctgatgacctattgcgcctatacgggtgaatccgggcgggacccgtcagtggtgcccaaaggctctcacgccgctcagccatccaatttctggcttgaagtgcatgacgcgctccaaacccatgagcatgcgatatcggctcaggactgtgtggaacggctgcaagccgccaatgccgggaagcccatgctgatctcggcgcaaggcgaagcgattgccactcccgaagggttctttatcggagagcatgccgcggcatacggtgacgccgtggtgggggaggcgtggcaaacgccgattacgcagacgaatgccgccgccgaattgccgtggccggctaccctcagcgacgcagtgcatgaacagctgtcacgtggcatcgatgtcatagccgcagattcctcgccacttgagcagcaccaagacgccggcccactgctgcaacgggcacaattgctggtggacgacgccgatttgatggccgatgccgctagcggccagtcgcttgatgaggcagtcaaagccaaggcgcaacgcgttctggccgcaggacgccagaacgtgacaagcctgcaagcccgcgtaggtggcatgagcgaacgggaggagcgcctctactggcgtagcattatccgcccgattccacgaatatcgtctccggcggccgaggccggcacgcagttccatgcgtgggccgagcaattcatcaatgccggtaagccggatgaagcggtactggcatatgaagccgaaccaagtatgccgcatacaggtcaggatgcgggattcgtttcccgggaagccatgttggccgatttggccgaacgggagcggcaatgccgcaagccgtccacacggcagcctgctgtcccacagcccacggctcaacaatccgcatccgtcgcatccgtcgcatccgtcgcatccgtcgcatccgtcgcatccgccacttccataagcagcgacaatgccaccgagtccaagctggtggcgtggcagcgcagactggccgaatcatcgtgggccaagcgcatcccggcgtggacggagcgtgccatcgtcgtggacgtgccgggcgtgggcctggtcaatggcaaactcgatgcggtattcatcggtggacttgacccgtccagcaccaccgcacgctttaccgtggtcgactggaaaaccggtcgtcggcccaccaagccagacgacatcacccgcaaacttgcccagctcgacatgtaccgactgctgctggcagcggtcgaaggtgtggaattggacagtatcgacgccactctctactatgtcagtgagcccgacgagggcttgcgcgagcttcacgcccgcgcgaaaaccaaacaggaaatccttaccgagttgagctccggcattcccgaacaatctgacaacgactgagcccaaaggctcatgacctgtacagcatcggacggccttcaccggtggagagaccttatgcatcgcaaggcatctccgacgatgaagacgactggccacgtaccggtccgcggttgaaacgcaccgcgtgacgttgctcgggaaccgctaccctcggatggcacgtgtgggcgggcgcacgtgccggacaacgcaccagtaaggagttattgtgtccacgactcgcgcggtttcgaagtcgtccgctgcccactcgccctaccagcgcctgttcatgctgcccggagccaaggcgttctgcctgtccggcgcggtggcacgattgccgatctccatgatgagtctcggcatcgttctggcgctcaaccatctctacgacaattggaccatcgccggcaccatgagcgccgcctatgtgctggccatgagctgcgtcaccccgttctacgcccgcgccttcgaccgtttcggccaagcccgcgtgggccggcttgcgctcgccgtgcagatcgtggccatgctcgccttcgccttcgcggcgttggtgcgcgtgccgattccgctgctgttcgtcttggccatcatcatgggtctgacgcagttctcattcggcgcattggtccgaacacgctggtcctatgcgttgcgcggtgtggaagatggtgaacagctgctcaacacggcctacgccatggaagccgccattgacgagatcgtctttattctggggccgattctggcggcttggctggccacctccgtgcatccggtatcccaactgttcgtgcccaccgtggcatgcggtatcggcggcaccatattcttctcgctgaaatccacccagccaccggttatcgtggaacaggtcaccgtggccgcgcacgatgacggcagccctgctgcaagcgaagatgccgaccagctgaccctgcgccagctcaaacgcagcggcgccaagcccaagagcgtattgctctatgccggcgtactgccgttgctcgctgtgttcatcgtgttcaatatgagcttcacgtccttcgacgtgtccattaccgccaccatgaaatccatgggacttgagcccttcctcggtctgcaattggcgatgttcgcggtcggctcgtgcatcggcgcgctggtgttcggctcttgccgactcaaaggctcccattgggcgcatatggtgatgttcctatcgctgctgaccgtcggctacgtgttcttccggctgtcaatggacaatctcatcctgctgggcgtcttcgaaatcctcgccggcctgaccgtctcgccgacgttcgccaccggcaacctcatcgtcaaggatctggtgccggcggaatccctgaccgaaggactgagctgggtaaccaccgcaggcacggtcggcacatcgatcggctcgtccgtggccggcattgtgcttgacgcctccaaccctcatgtgggcatgatgctgccattcatcttcacgctggcgtccgtgccattggcgttggccggatgggccttggccaagcggcgtgggtgaaacggaatcgggctacgcctgatggatggttggcggcttcgccgggggtctctccctcagtccgcttcgcggccagctcgaacgcaattaaatgatggctttcagccaactgaattattgctcactgtcgttcgccctcacctaaaaacgcctccggcgttttcttcacggttcggctcatcagagggagctcgacttcacggttcggcttgtcagagggagctcgattctgtggacgggatattggcgtgagggcttggcggtgataggctgattgccgattggaaaacgttccgggtacattgccgggcaggtacgggtagacagggaagaagacatgatcaaggtttcggtggtcggagcaaagggccgcatgggctcgcacgtggtcgaagcggtgaacaacgccgaggatacgcagctggcgctcgcattggatgccggcgacgacctgacccaggtcaccaccgacaacaccgatgtggtcgtcgaattcaccgtgccgtccgtcagcctgaacaacgtgctgaccctgatcggccaaggcgtggacgtggtggtcggcaccaccggttggaccgacgagaaactcgcccaggtcaaatccgccatcgccaacggcccgaagcccgaaacccagaaggtcttcatcgcacctaatttcgcgatctccgccgtactggccgactactttgcaaccaaggccgcgaaatacttcgaatccgccgaagtcatcgaactgcaccaccccaccaaggtggacgccccctccggcaccgccattcacaccgcccacggcatcgccgaagcgcgcaaggccgcaggactcgcccccgtgccggacgccaccgaaaccgatggcggctcacgcggccaggtggtcgacggcatccacgtgcacgccgtgcgtctgcgcggcctcaacgcccacgaggaagtgctcttcggcaacgccggcgagcagctgaccattcgggccgacagcttcgaccgcaccagcttcatgcccggcgtcctgcttgccgtgcgcaagctcgccggcgacgctccggctggcctgaccatcggcctcgaccacttcctcgacctgtaatcgacccgcagtcgaccagtagtcgcccccgcatttcaggcagggaagcgcgccgggacgcgcagcacggcattgccaccggctccggccataatgccacgcattcagcaacaatcaaggtacgtagtataagagtccacaatgggaagtacggtgaacactatgagcgagcatgacatgcaccttcttgagccagcacctttcggccgcattctgccggctatggtcaccccgatgaaatccgacggcagcgtcgatttcgccgccgcgcagaagctcgccaaatacctcgtcgccgatggcgcggatggtctggtggtcaatggcaccaccggtgaatcgcccgtcacccatatggatgagaaggtcgagctggtcagggccgtcaaggaggtcgtcgacgttccggtgatttccggcgccggctccaacgacaccgcacacaccgtgcgtatggtcgaacagactcaggaagcgggcgccgacgcggtgctcgtcgtcatgccttactattcccgcccctcgcaggacggtatcgtcggccactacaaggccgtcgacgaatccgccgaaaagccgatcatcgtctacgatgttcccggccgtaccggcttgaaggtcaaggtcgaaacctacgaccgactggccgaacttgaacacgtcaaggctgtcaaggacgccaccggcgatcttgcagccgcagtggagaagcagcagcgcaccggcctcgcctggtattccggcgatgacggcctgttcctgccgttcctctccatcggcgccgtcggcatcatttcggtgattgcccacgtcgcctccaaccccatgcagcagcttgtccaggcattcgatcgcggcgatatcaccaccgcccgtcgcctcgccaaccagctcgccccccttgtccacgcgttgaatggcgacggctatcaggccgtcatggccaaggctgcgctcaaggtcaagggcgttatcccctccaccaccatgcgtctgccgaacatcggtcccgacgccactcagcttgacaaggctgaagagggcatgcgcgctgccggactgctgtaagcccgaaacgctgcatacgggttgccagcccgccgcccctgcatgacagagcagaggcaccacaacagaaatcccaaaaaggttatggcacaagaacaaaagaaaacaagcaagaacacgaattctcgccgtcgcggttccgcgcgcggccgcaacgccaacggatccaacagccgtacgccgtcccgtaagatcaacgccacccggcaggccaccgcaccccagcaggatgccgtgctgatcgccccgccgaagtaccgcaagggctccatgcgcatcacgccgctcggcggcttgggcgaaatcggccgcaacatgaacgtgatcgaatacaacggtcacctgctgctcatcgactgcggcgtgctcttccccgaggaggagcagccgggcgtggatctcatcctgcccgatttcagctacatcaagaaccgtctcgacaaggtcgacgccctggtgctcacccacggccacgaggaccacatcggcggcgtgccctacctgctcaagctgcgtccggacatcccgctgatcggctccaagctgaccctcgccttcgtggacgccaagtgcaaggaacaccaccagaaccccaccaaggttgaggttgccggccgtgagaagctcaaggtgggccccttcgacctcgaattcgtcaacgtcacccactccatcccggacgccttggccgtctacgtcaagaccccggccggctccctgatcgacacgggcgatatcaagctcgaccagctgccgctcgaccaccgcatcaccgacctcgtcgaattcggcaagatcggcgaaaagggcgtggacctgctgatgatggactccaccaacgccgaggtgcccggcttcgtcaagcccgagacctccatcggcccggcccttgaccaagcgttcgcccaggccacccgcaagatcatcgtcgccagcttctcctcccacgtgcaccgtgtgcagcaggtggtggacgccgcccacaagtacggccgcaaggtcgtgttcgtcggccgttcgatggtgcgcaacatgtccatcgccgccgacctcggctacctgcacatccccgaaggcaccgtcgtggacctgaagcaggccaacgacattcaggacgacaagctcgtcttcatgtgcaccggttcccagggcgaaccgatggccgcactcggccgcatcgccgacggcaaccaccgcgacatccacatcaacgagttcgacaccgtgattcttgccagctccctgattccaggcaatgagcacggcgtctacaaggtgatcaacaagctcgtgcagctcggcgccaaggtcgtcaaccgcgacaacgccgccgtgcatgtgtccggccactgcaacgagggcgagctgctgtacatgtacaacatcgtcaagcccaagtgcgccatgccgatccacggcgagaaccgtcacctggtggccaacggcctgatcgccgtcaagaccggcgtggacccgcagaacgtggtcttggccgaagacggcgacgtggtcgacctgtatcacggcaaggccgcggtcgtcggctccgtgccgtgcggttacgtgtacgtcgatggcgattccgtcggcgagctgaccgatgacgagctggaaaagcgccgcattctcggcaccgagggcttcgtatccgcgttcgtggtggtcgacaccgacaaccacgaggtcgtcaccggcccgaagatctacctgaacgccgtggccgaggacgaaagcgagttcgacaaggtgcgtcaccagatcgtcgaacagctcaacgaccagatgatgcagggcacgcgtgacacctacaagctgcagcagaccatgcgccgcacgctcggcagctgggttgcgcgccagctgcaccgcaagccgatgatcgtgcccgtcgtggccgacatcgcccaggacgtcgaaaccgtagaaaccaagtagtccggattatccagggacgaccgtaaggagtaattgaagtcatgcccggttctaatctcactcgtattgaagccgaagaacgtaaggccgttatcgaagcgccgattcattatcacgtcgaccttgacctgacggtcggcgcgaagaacttcggttccaagtcgctcatctgcttcaacgcgaagcctggttcgtcgaccttcctcgacctgattgccgacgaagtgacatccatcgacctcaacggcaagtccctggacccagccgtggccttccaggacaaccgcatcgaactgaccgacctcaaggagaagaacgaggtcaccgtcgaagccaagtgccgttactccaacaccggcgagggcctgcaccgctcggtcgacccgtccgatggcaacatctacctgtactcccagttcgaggtgccggacgcgcgccgcgtctacgccgtgttcgaccagcctgacctgaaggccaccttcgatttcaaggtgctcgctcccgccagctggatcgtcacctccaacatgccggttgccaccatcgaggacgatccgcgcgaaaccctcgacggcaccctcggcgacaagccgaacgaaagcacccgtctgtgggacttcgagccgaccccggtgatgagctcctacctgaccgccatctgcgccggcccgtacgccgaatggcacaccgaatacctgaacgaagacggtcgcaccgtgccgatggcccagtactgccgacagtcgttggccaaggccttcgcgaaggacgtcgactacctgttcgacatcaccaagaagggcttcgcgttctacgccaagacctggggcgtgccctacccgtacgccaagttcgaccagatctacgttcccgaatacaacgcgggcgctatggagaacatcggcatggtcaccatccgtgactcctacgtgttcgagtccaaggtgaccgacgcgctggccgagcgccgcgtggtgaccgtgctgcacgagctggcccacatgtggttcggcgactatgtgaccatgaggtggtggaacgacctgtggctcaacgagtccttcgccgaattcacctccacgctggccactgccgaagccaccgaatggcatgacgcctgggccaccttctgctccggtgagaagagctgggcgttgcgccaggatcagctgcccaccacgcacccgatcgtcgccccgatcaacgacctcaacgacacctacgtcaacttcgacggcatcacctacgccaagggcgcctccgtgctgaagcagctggcattctacgtgggccgcacgcagttcttcgaaggtatccacaactacctgaaccgccacgcctactccaacgccaccctggccgacctgctgagcgaactggagaagacctccggccgcgatctcaaggcctggagcgccaagtggctggaggaatccggcatcaacacgatcgccaccggcctgaccgtaaacgcggacggcaccatcgccgaattgaagctcacccagagcgcgccggccgaacacccggtgctgcgtccgcatcgcctggccgtcggcttctacaacgaagacgccgaaaccggcaagatcgtgcgcaccgagcagttcgaactcgacgtggatggcgaaaccaccatcgtcgaggccgcggcaggcaagccgcgcccggcattcgtgctggtcaacgacgatgacctgacctacaccaagattcgtttcgacgccgaatcccaggcattcgccgaagccaacctgcatcgtttcgacgatgccctggcccgcgccgtgacctggctcgccttctgggatatgacccgtgacggcgaattcccggccgaacgcttcgtggacatgaccctgcgtcttctggccacggaaaccgaatccaccaccttccgttacgcgctggcctgcatgagcaccaccgcccaccactacgtggcgccagcccgccgcgacgatgtgctgcgccacgtggccgccgagctgtggaccctggccaacgccgccgaagccggctcggacacccagttccagctcgccaccgcctacctgggctatggcgaggagggcgatgccgcattcgccgccaacgcacacggtctgctggacggcaccgtgcgtcttgaaggcctcgaaatcgacaacaacttcacgtggaccatcgtccaagcgctcacctccgtcaacgagatgaccaacgacgacgtggacgcgcagctcgccaagaaggagaccacggaaaaccgcgagttcgcctacggcgcccgcgcctccatggccacgacgcaagccaaggaatgggcttgggatcaggcactccacaacgacgagctgaccaactcccagctcgaagccgtggcccgtggcttctccgccaccccgcgccacgacctggccgagccgttcgccgcccggtatttcgaggccgtcgactggatctgggcgaacaagacctaccacatggccgaggccctgctcaacggcctgtacccgggttacgccgatcccgccacgctggtcaagctcggtgacgcctggctggacgagcacattgccgccgacaacgccctgaagcgtctgatcgtcgaaaacgtggcatcctcccaccgcaccctcaaggttcgcgaatacaacgaagcgctctgatttccttctggctcccctcgggtgcgaggggagttgtcgcctcaggcgactgagggaatcgcttccgcgaggagctacgtccacattccaacataaaacccgcaaccaatcctcaacagcgtattctcgctcaaggccggcaatgtgccggttgatgagcgacaaggatacggggaatgattgcgggcttttccataacttcattactactgattctgttggccggaatcggcgcaggattcgtgggctatgcggtaggcgcatcgtcactggtctcatacccggccttgctcgcgttcggcattccgcctgtattggcaaacgcttctaacaccgttggcgtggtcggcacgggcatcggtggcgtgatgggcgcgcgcaaagaactcaaaggccaagcggtacgctccattacgtatgtggtcattggcgcgttcggcggggtggccggtgcgtttctgttgctcaaactcgacccgagtgtctttgaattcgccgcaccagtgctgattttgctgagctcgctgatcatcgccatcaatccgcgcggccgcatgcaggccaagcaggccgccgcggatgccaccgcgcaactcaagcacatcgaagccactgaagccaccgatgccactgatgccgccaagcgcgcaaccacccctaccgcacctcaccgcccgccggaacaactcgtgcagcccatgagccaggattcctggtgggtatggctgggcgtggtggcagtcgccatctactccggctacttcggcgcgggcgccggcaccctggctctcgccatgcttgatgccgccaaaatcggcccattccacaagatcaatgcattgaaaaccctgatcggcacaggcgcgaacatcagcgcctcagtggtattcatcatccaaggcgcggtcgattggccggccgccatcatgctgtgcatcggctgctttatcggcgggtacatcgccccgcccatcacccgcaagattcccgcaaacatcatgcgcgccgccgccgtaatcgccggcatcattctcaccatcgatctggggctcaaaacctattgattcgtgccttacactgatgcagtgaagcatacagcatggccgccaaccgcagcgtggccgcagaccccgataaggtggccaatgtctggcatttggcgactgcggaacctgagcgcctagaaaccaacgcggtaggcaaagaggtgagtgacttcctcgatccgccagacacgtcgcagattcacggcgttgcgtgccatgctgattggtggttcgcggcgcgagcaggtgctgttcgccggcgttatgaaggagctactcgcgcccatcaacaatccgcgatatgtcatcatcggcaaggaatggggcgtgcgcacgtacggtgtaagcttcccatgcccgtccatatttgcccgccgccagcaggacgccgaaatactgcgccggcagttggaccgctgcctgacgcattgcaccatggtatacacccgcactgaggaaggccggcgtacgctacttcgttgccaaacgcgttctttcctcaaccgtgacgaacaactgccgcgcatactgaccacaacatcggagtgatagatcgttgcatgcatagccgagaccactccggtagaggagatgccgttgggcatgttcaccgcatggctcagcgtgttcctcgccgtcgtgttgtatacgatcacgtttgccggcccattcgtgctggtacgccgtcttcgttcccgcgccagagcccatcgacctgcccggcatgcccgttaaccgatacttctcattgttcgtctatcgagcaaggtggcacgtacgatacttggtataggggagagtttctcgctgtctgtggtggaaaatccgagttttattatctgagttagtgctttgggtttgcgttttgggctcgatttactattggacggcgatatccggggcgggcggctagctgttggggttcttgtcgcggctgtagatgtgtgttcggtctatcggtgatgcttgtcctgttcgtggaccgggcgaagtgcgggacgacgcgcggatttcgcggtttttcgtctgccgtcccgcagagagcccgggggatgattatggtccgtaaacggggattggcgtgattgcgcggttctggcggttgatagtgtggaacgccacgaacgtcaaacgattgatttctctaccatcccacgttcctgcgggacgccgcgcggaaaccggccaaatccgcgtgccgtcccacaggcatgaggctgtattcggccggccactgtccatggcggacggacgaacagaccccactggctatcgtctgcgcttctgcagcgctcaccccggccttccacggaaatcatgacagcatgaaggtgacgaatggcctggcttgcctgtggacgccgatcaatgtgtgcgacaatgattcgcggtacatggcccctggccggggtggtcacggcatcattggtgatgagattgttggttgaggcgcgctcggtgtcaagacaactcaccaggaatttcgatacgagcctcgaccggttgggcagaatatccggtgcgcccacaatgcctacgctggagccgatgggaataccttcaagttcgttgtcgtctacggtgataactcggtattcgtctgaggggatgagcagacgtgcgctggtggtgttgattaccggatgcagcacaccgttgacgctgatgaatcgagatgcggtgtttttgcccacaatgagtttgttattgctccagtctgaaggcaggccagggctgatgatgccatagaacacactgatcagaaccatgatggcggtcaggccgatactgaccatcaccggcgtcaggcctttcttaggagtcagctccttgccatccggcataccggaagtgaaggcagtaatgagcctggcccgcgaatagttttgtgcgtcctgcaggtccttcttattcgccatggcccctcctcacaatcccaatgccacgtaggcgagcggcagggtggccaccacacagattacgttcgaggcgtcagccagacgggtcatggcgatggaatcgtgcttggacagctgtgtgccgatgacgcacagcaacgctcccagtgagaacaagcccaccaccaccgaagcccacgtggggtgaaacaccgtgcatgcggcacaagacaggcagatgccggcacctgcggtgataacggtgatcagcatttccgattgtgcatagatgcgcctggaatcaagcagcatggctgcgaacagaaccaaggtaagtgccacgcctgctgggcttgcactggaaacagccagaggcgtgccgaacacgatcagtgcgctggtggcagcgcgcaggtcgaacagcagcgtggagccgatacggtacttattacgcacttcgctgatatcgatgttcttgggcagcgcgaaaatctccgattcgctggtggggctgtccacagacaatcgtgcggaagacaggctgagccacggcagcgcattggcagccagaccgagcagagccactgccacgatccatacgcgagtggaccagtgcggcatcgttacacacacaatgccgagaatcaccagtgctgcgccgataatgacaggaatcaacgcgtacagtctgttcactgtaagcagcaaacatgaaatgccgccggccagcagtaaaccagcaccgataccaacggccgggaacccgtagaacgagggattgaacagtgaacccatgagatgatatccggtcacgccggccaaaagcgaggcgactagcgacagtgccagtgcctgccgatgcatatggcgcgaagccagtaccgtggcaatcgccagtaaagcggctgcggtaatgcccgctacgccagcattgatgatggatagtggggccaatgccagacaaatcgctccgacacccagtagcacacaactgaccaccattgtggtcactgtggtattggcactggtccacggtcgatgagaacgctccaccgaatcggccaccgcctcaaccacatcgtcgtagacgatatcctgatcgcccaaggcgttgacctcgagtttgagacgttcaccgtctcggatggcctgatcggccagcgaagcgggattattgatggcggtttcgtcgtcacgggtcagtcggtagccggcatacaccagagtcggatcgaacacacctagtttcttggcgatatcaggcagcagttcagctaccggaagtgtcgacggaacattgagtttcgcggagcgtttgccatacaccacagtgatggccacgcgcggggatgatgcggaaggcgagggctgattggctggcactcccatcgcaatcgaaggtacgggcgttggcgccggaacgtgtggtgctatgcgcggcggtgccggcatcatggacggtccggcgggcgtgtggcgatgcgacgatgccatagggtgcttcctcttctcaataaactcccaaaggtctactgtattcttgtattctctcacacattgcgggtatcgggaatgccattgtctggtcctagagcagattccgtggcgttttttgccgagtcgggtcctagggtggagcacaacgactacgatggtgcgggtaacgcgatacaaggagtggaacttcatatgccgaagatgtttggaaccgatggtgttcgaggactggccaatagggatttgaccgcacgtctggcgttggatttgggcgatgccgccgtgcgtgtgctcggtgacgccggcacccaagacgatcagcctgagggacgccgccgcgcgctcgtgggccgtgacacccgtgtgtccggtgattttctggcttccgccctgtccgcgggcatggccgccggcggcttcgacgtgatcgatgccggcatcatccccactcctggcgtggcctacctgacctccgtgctcaacgtcgaaatgggtgccgtgatctccgcctcccacaacccgatgcccgacaacggcatcaagttcttcgcacgcggcggcttcaagctgcccgaccagaaggaagacgacatcgaggccgtgctcggccaggactgggaccgcccgaccggtgccggcgtgggccgcgtgagccacgaccagaccaccgccaccaacctgtacatcgatcatctggtggccaccatcgctccgctgaacgatgacaaaacccagcccaagccgctcaagggcctgaagatcgtggccgactgcgccaacggcgccacttccgtggtggctcccgaagccctgcgccgtgccggtgcggatgtaatcgtgatcaacgcctcgccggacggctacaacatcaacaagaacgctggttccacccaccccgagcagctgcaggccatggtcaaggccaccgatgccgtgatgggcgtggccttcgacggcgacgccgaccgttgcctcgccgtggacgaagacggcaacatgatcaacggcgaccagatcatgggcattctggcccgtgccaagcagcgcgaaggcaagctcaaccacgacaccctcgtggtcaccgtgatgagcaacctcggtctgaagctcgccctgaaagacatgggcatcaagaccgtggaaaccgccgtgggcgatcgttacgtgcttgaggaaatgctcaagggcgattactcgcttggcggcgagcagtccggccacgtgatcaaccgcgaattcgccaccaccggcgacggcaccctgaccgcactgaccctgtgcaacgaggtcgtcaagtccggcaagagcctgaaggagctcgccgccgacttcccgcagctgccgcagaccctcatcaacgtgccgaacgtggacaagaaagccgccgccaccaacaagcgcatccaggatgccgtggcccgcgaggaggaactgctgggagacaccggccgtgtgctgctgcgcccctccggcaccgaaccgctcgtacgcgtgatggccgaagccgccacccaggcctacgccgacgaagtctgcacccgcctcgccaagatcgtcgccgaagaactcgcgctgtagcacccttccctaaggaaaagcaatgtttggaaagaacgccaaagtcgacctcgaactcaaccgtgatgtcgaacaactcatcaaaaccggcggcaaggagaagctcctgcccatcgtgcaggccggcgaaccggtgttgcgccaacggacggtggcctaccatggccagctttccaagcgtacgctcgccaaactcatcgatacgatgcacaccaccatgctggaggcgcccggcgtggggctcgccgccacccagatcggcttggggctcgcgctcgccgtggtcgaagaccacgtgcgcgacgacgaggatgatccgcgcgaaatcgcggaattccccttccacgtgatcatcaatccgagctacaaacccaccagcgacaaaaccgcctcgttctacgaaggctgcctgagcttcgacggataccaggccgtgcgcaagcgttggctcgacatcaccgccgaatgggatgatgaagacggcaagcaccacagcgagccgttgcacggttggcccgcacgcatcttccagcacgagaccgatcatttgagcggcgaactgtatatcgatcgcgccgaaatccgttcgctgaccaccaccgaaaacctcgaggattattggtgcgacgacccggtacccaccgaggccgccgaagaactcggcttcgcactatgatcgaccgcacatggctggacgccgccaagggagacattccccaatgggcggcgtccatgcccaaagacgccgacggcaccaccattgactgggactgggtgcgttcgctggacctgatgcatggcatcagcgtattgctggcgcttgctgcagatggtgagcaatatggcgaaaccgcagcacagcctcagctcgggttggaccaaccggaactgacgccacaagctatccacgacgcattgaagatcgattacgccacacgcgagcatctggaatcaatcatcgcccaatgcaacagcacattcatgaccgattacgatcgattcatcggctcctatcgtctgcctcgcgcgctcgcctacgccaatcgtcggctcaacgacaacatcaacacgctgttgcatctgggcgaacagcaacacctatgggtggtcagtcgcgaacggcgggggaggactaccgttgccgtgctcaggccgtactccggcagccgcccatcgaacgatgaccaaggcatgctgaatctgagcggtgaaaccggtgacgcatctgccggaaacactgctgccgaaaacagcgatgtcaagttccccacaacagtcgccttggacgatatccaagaccgtacggcggcgattcttgacgcacgcgccgaacgacgtaaggcccagcgcttccaggagcgtgcgggcgatgcggcgatggcccgcgccaatctctccggcgcgacttcgccgggtggtgccgcctcgtctggcaacgctaccggccaccatcccaagcccgactggcgcgacgcctatctgcccggccgcgacgtggacgcggtgatgggcatcgacatcgaaaccaccggcatcgatccggcgcgtgactacatcatcgacgtcggcttcgagttcatgaacatggccagtccgcgcccggccggcgaacctgagacatacgcctatgagcagggctattacgccgccggcgacgcctacggccagtcccgtctcgcttttggcgtgccgccggaaaacgcggcgctcggcaacgccctcatcgccaaactcaccggcatcgatgtacgcggccgcagcagcgaggccgggtaccgactcttcgacgaatggccccaagcccaggccggcctgctcgcgcggcttacccagcagccgtacgtggcacataacgccaccttcgaacatagctggttcatgctgaacgtcgccggatacgcggaaagctaccgtgccgggcgcatcaccatcatcgataccctgccgatgagccggcagtgggaccccggcgcggtacccaccaacgagcatccttacggagacaacacgctcgacgcctacgccaaacgtcagggcgcgcttgattccgcccacaacgaacgccacttgggccttgaggattcgcacatcatgctggtggccatgaaacaccatctggcggcgctgaaagcgcaaaggaaagggccgtgggggcccgccggcagggctggcgtcggcggcaagtcctgcggtcgtaagcggtgagtacactattggtctcgtgagtaactatcaggacggccgacagcagcgtgagaaccgccgccgcaccatcgtgcgtgtggtgtgtgtcgtcatagctgtggccatgctcggctccctgatcatcccggcgatttacgcggggctttgacgttgccttcgcatattcgtgcccgcagttgaacacgtctgatgcgagggatttgtgaggtcgcccggccggctatcggcaaggcaggcccggaaccttctggcagcatggattgcaggcggatgcgtgtgtggcgcggcaatgcccgccaacgccagaggaatgtgcgaaggctgtcaacaaggacgtgacttcccaaagaatctcaaagaatcaacagtaaggtaaaccacgatggcagaatttgactttacccaggcgatcggcgaagcccgcgccaaatacgaatccatcgccaaggcgctggacgtcgaccggctcaaggccgatatcaaggatctcgaaacgcaggccgcggccccgggtctgtgggatgatccggaaaacgcccagaagatcaccagccggctgtccgccgcggaatcgcagctgaagcgtctgaactccgcctcccagcgcatcgacgatgtggaaacgctcgttgaactcggccacgaggagggcgaccaggactctctggacgaggcgcaaagcgaaatcggcgagattcagaaggatctcgaccagatggagatccagaccctgctcgatggcgaatacgacgaacgttccgccgtggtgaccatccgctccggtgccggcggcgtcgacgcggccgacttcgcgcagatgctgttgcgcatgtacctgcgctactgcgagcgtaacggcttcaaggccaaggtcatggacacctcctacgccgaagaggccggcatcaagtccgccaccttccaggtggacgccccctacgcttacggccgtctgtccgtggagggcggcacccaccgtctggtacgtatctccccgttcgacaaccagggccgccgccagaccagcttcgccgccgtggaagtggtgccgctggtcgaggccaccgaccatatcgacattccggatacggacatccgcgtggacacctactgttcctccggccccggcggccagggcgtgaacaccacgtactcggccgtgcgcatcacccaccttcccaccggcatcgtggtgaccatgcaggatgagcgttcgcagattcagaaccgtgcctccgccatggccgtgctccagtcccgactgctcgtgctgcgccacgaggaggaggccaagaagaagaaggagctcgccggcgacatcaaggccagctggggcgatcagatgcgctcctacgtgctgcacccctaccagatggtcaaggacctgcgcaccggctacgaaaccagccagactcaggccgtgttcgacggcgacatcaacgcgttcatcgaggccggcatccgctggcgccatgaacagcgccgcgccgccgaaaccgaggagtaaacagcattatggcactgatctcactggacaatgtgtccaagatctatcccaaaggcacccgaccggcgcttgacgacatcaacctcgatatcgaacgcggtgatttcgtgttccttgtgggtgcgtccggctccggcaagaccacgctcttgagcctgctgttgcgcgaggaggaggccaccagcggcgagattcgcgtggccggcaacgatctgcggcgcatcaccaaccgtcaagtgccgcagtaccgccgttcgctgggcttcgtgttccaggattacaagctgctcaataacaaaaccgtatgggagaacgtggcgttcgcccttgaggtgatcggcacgcggcggtccaccatcaaatcgttggtgcccaaggtgctgaataccgtggggctcaccggcaaggaaaagaactatccgcatgagctctccggtggcgagcagcagcgtgtggccatcgcccgcgcctacgtgaatcacccgcagattctgctggccgacgagcccaccggcaacctcgacccgaccacttcgctgggcatcatggaagtgctggacgccatcaaccgcaccggcactaccatcgtcatggccacgcataacgaagagatcgtcaactcgatgcgcaagcgcgtggtcgaactgcacaacggcaagatcgtgcgtgacgaggctcatggctcctacgattccgccctgttcttcccggatgccgaagtcgaagccaagtccgacaccgcccatcatgtgctggcggcggcgaccaaggccatcgagggcagtgacgagccgtctgaaggcatcgcccgtttggccaattccgtgcattccggccgcaccggccgctatggcgagacgtttgcgccgctggaagacacgctgacctggggcaagggcatttcgttggatgagcaggccgccgccctggaaagcacccaggcgttcgacccgttcaaggacgagtccgccgcgaccgccgcggttgccgatacgtccgtgtcatccgccgccgagccgccggccccgccggagccgcccgcaccgccggaaccgcccgcaccgccggccaacgagcagtccgccgacgagcagtccgccgcagaccaaacatccgacgatcaacccgctgagggcgcgaaggagtaagggggatcatcatgcgagcacgattcattctgtccgaaacgtgggccaacctcacccgtaacctgtcgatgctgctgtcgctgacgctggtcaccttcatctcattcctgttcatcggcgcttcggtgcttactcaggcgcagatcaccaaagccaagggcgactggtacgacaaggtcgaggtcgtggtgtggctatgtcccgacggcaccagccagtccgcgaactgtgcttccggcaaatcgccctcagccaatgagatcacggcactgcagaaaaccattcgcgatgaactcaacgacgtggtctccaacatcgactatgtcagcaagcaggatttctacgacaacaccttcaccaagcagtacccgaacggtgaattccaaggccgtacgctgaccgcggacgatatgcaggactccctctggctcaagctcaaggaccccaccaaatatcaggtggtctccgaagtgctctctggcaaggagggtgtggaagacgttaccgatcagcgccagatcttcgacccggtgttcgccgtgctcaaccgagccacggcggttacggctgtgctcgccggcgtgatggtggtggtcgccatcctgctgaccggaaccaccattcgtatgtccgccgcatccagacgaaccgaaaccgaaatcatgaggtacgtgggtgcctcgaactggacgattcgtctgccgttcattctggagggcaccatcgcctcgctgatcggctcggtgctctcgtgcctgatgctttcggctatcgtcaacgtgttcgtcaccggctggctggcgaaatccgttacatggattccttatgtgaatcagctcacggtactggtgatatcgccgttcctggttgtgggcgcgatactgctgtccatcatcgcttcaaccatttcgttgcggcgttatttgagggcgtaacgcgaccggcttacccgcgagaaatgtgatgacatcgtgtgcaagcctctcaggttcgcatgttatggtattggcttaagtgagcgaaaggactattcacatatgacgaacgtacgtgtgatcaagcccgcactggcggcactggtggccgccgcagcctgtgtgggaggtctggcgttcagctcggcacagcctgcccaggcagacacctattccgacctgatcaatgcgcagaaccagcacgccgcgtcggtacagcgcgaggccgaactcaagcagcagctggccggtgccagccaggacctggcgaataaggtacttgagctggacgatctgaccaacaacaagattgtcgccgcgcaggccaaggtcacgcaggccaacgaggatgccgccaccgctcaggacgaggccgacgccgcatccaaacgtctttccgccgcgcagaaagacaaggagacgctcgaggagcggatcaagcagaccggcaaggactacgatgacgcgcacgccgccgtggcccagctggcccgtgacgagatgcacggctcgaatgcttccgacgtgatgagcgtggtgacgggtgccaccagcacacaggacttcgtcaactccatgcagtcccgggacgcgttgtcccgcaacgaggcgaatgcggcttcctccgccgcgacctcactgagcacgtcgaagaaccgtggcgaacgtctggcggccatcgaaaagcagatcgctgtgctcaagacccagtccgatgagaaggccgcttccgcacagaccgccgccgaaaccgcgcaaagcgaacgtgacgctttggacaagctacgccaggagggcgaaacaaggcgtgacgaactgtcttccatgatcgacagtctggattcccaatccgccaagcaggcggcccagaccgtactgatcgcttcccaggtcgattcctacaatcgtcagtaccagaaggaacagcaggacgccgccaaccgggtggataccggtaaccagggcggtacgccgtctactccggtgacccccgctccggcgcccgctccggctccggcgccggctcccgtccccgctcccgcccccagcgtcggcggccaaggcacgtcgaacggtgattacggcaacgcctatgccgccggccagtgcacgtactgggcgtatgaacgccgtaggcagatgggcattggcacgccgtcctatctcggcaatggcggcgactggtggcgcaacgccccctcgtacggcttgcgcgtggaccacaaccctcaggtcggtgcggcgctctccttcctgcctggtcaggatggtgccgacggtacctatggccatgttgccgtagtcgaagccgtgtatggcgacggcacattccagatctccgaaatgaactggggtggtccgtggaacatgcacgaccgcaccttgaccaatttgggtcagtactggttcgtccactgaccggttggttcggccgatatatgcggttgaagggttcctcttgaagaggaacccttttcgtattcgaggccggtccgtgatatcgtcggatgttgcgttgctacccacgagttgctacccacgagttgctactcacgagttattgcccacgaaaggaggagacatgcccaaggaaaccggtgagaaactcatcgtccagaacaagaaggcccggcatgactatgccatcgaagacaagtacgaggcagggctggccctgaccggcaccgaggtcaagtcgttgcgcgaaggccgcgcatcgctgtccgaggcgttcatctccatcgaccgccgtggcgagatgtggctggagggcgcgaacatccccgaatacctgaacggcacatggaacaaccatgcgcccaagcgcaagcgcaaactgctgctgcaccgactgcagatcaccaagctcgcccgcggcatcgaagccaagggatacacgattgtgccgctgagcctgtacttcaaggacggtcgcgtcaaggcggagatcgcgctggcccgaggcaagaaggaattcgacaagcgccaggccctgcgcgaagagcaggacaagcgcgaagccctacgcgccatgcgctacgccaacatgcgccactagtcccgccccttggctcccctccggaggggagccaagggtaggatgtccgcgttgtgggtcatttcgcccacgattaacgcttccgtagcattgcactcctacgctctggaaccatctgggaaacatacccgcccagctgactatccggagagaggaaatccaatgtctctaagcaagggaatacaatccgctgcggccgccgccctgagcgcggccatgctgatcgccgtggcggcctgtggcacgactgacagcaccgacaccgcatccaagagcggcgattcatccaaggactcgtccagcacttcgattcaaggcttcgacaccagcagcatccagaaggacgacgagattgccgcactgctgcccgattccgtggccggcgacggcacgctgaccgtcggcgccgatacttcctatgccccggccgagttcctggccgaggacggcaagaccccggtcggctttgatgtcgacctgtccaaggcgctggccgcagtgttcggactgaaggaaaacaccgtctcctccacgttcgattcgattatcccgtccgtcggctccaagtacgacatcggcatctcctccttcaccgtgaccaaggaacgcatggaggctgtggacttcgtgacctacttcaaggccggttccacgttcgtggtgcagaagggcaacccgaacaaggtcgactcctcgaacctgtgcggcgtgaaggtggctgtgcagaccggtaccacccaggaagaggaagtcaacaaggataacgagcagtgcaaggcggacggtaaggatgccatcgacatccagtcctccaagctgcagaccgatgtgactaccgccgtggcttccggtaaggctgatatcttctacgccgatacgccggttgccggctacgccatcaagcagaccggtgatacgctcgaggccctcggcgaggacgttggtgtgacccctgaggccgtggccgtcaagaagggcgattccaagaccgccgaggccgtacagaaggccatccagaagctgatggatgatggcacgtacaagaagatcctcgacacgtggggcgtctcttccggcgccgtcgacaaggccgagatcaacccgtccgtcgagtagtttcggttactatgaagactcccgttgccctgcggcgggagtctttttgtatatgtatgcactgtagtgtataaatatgcttaaccgttgatcgttgccgttgaagcggcgtaagagagaagaagaaacgattatgcagtccaccaaactgaagtccattatggccattgcactgagctcggccatgctgttcgccaccgccgcttgcggcgcctccgacaaggccgatgccggtacggattccgccaagggctccgatgccgccaccatcaccagctacgatgtcagctccgtggagaaggatgacaccatcgccgcactgctgcctgaatccgtgaccaaggacggcaagctcaccatcggcaccaacccctcctacgccccggccgaattcctcgacgccgacggcaagacccagatcggctacgacatggatctcgcccgcgccatgggcaacatcttcggtctcgagaccgaaatcgtctcctccaacttcgatacgatcattccggccatcggctccaagtacgatctgggcatcgccgccttcaccatcaccaaggagcgcatggaatccgtagacttcgtctcctacttcaccgcaggcatgggctatgcagtggccacaggcaaccccaagaacgtcgatgagaacgacctgtgcggtctgaacgttgccgtcgagaccggcaccgtcgaggaagaggccatcaacaagaccgccaagcagtgcaaggcggacggcaagaaagacatcaccatccagtcctccaagcagcagaccgacgccaccaccgctgtggtgaccggcaaggccgacgtcttcttcgccgattccccggttgtcggctacgccatcgcccagaccgatggtcagctggaacagctcggcaaggacttcgatgaagtgccgaacgccatcgccatcaagaagggcgattcccagaccaccgaagccgtgcagaaggccatgcaaaagctcatggacgacggcacctacactaagattctccagcactggggcgtcgaatccggtgcactggacaaggccgaaatcaacccggccgtcgaatagtcgacaagctgtcgcgaaaattcgaatggggcgcactgtttgtaacacagtcgccccattcgtgcactaaggttcaacgctagttgcaacttgcagttcaggctgcctaacacatccaaggaaccagattatggcgaagaaagaagtcgacggtgaggggctgaacatccccaaccgcatcaaggcgttgccggtcaagcgccccggcccgattgtggccgcagtgatcgtggtactgctcgccgcgatgctcattcaaggcttgattaccaatccgcgactggattggcccaccgtctggaagtacctgttcaacgagaacgtgcttgaaggcattcgctataccttggagcttaccgtgatctccatggtcgtggcgatcatcctgtcggtgattcttgccatcatgcgcaaatccatcaatccggtgctgcgcggcgtcagctggttcttcatctggttcttccgcggcacgcctgtgtacacgcagctcattttctggggtctgttcgccgtgctgattcctaagatcagcctcggcattccgttcacctcggtggagttctggagcatcgactccaacgtggtggtcaccgcattcaacgccgcatggattggtctggccctgaacgaggccgcctacctgtccgaaatcgtgcgtgccggccttgaagccgtggaccccggccagaccgaggcggccaaggcgctgggcatgaaccgtacgctcatcatgcgccgcatcgtgctgccgcaggccatgcgcatcatcatcccgcccaccggcaacgagaccatcggcatgctgaagaccacctcgctggtcaccgccgtgccgttcaccctcgagttgcagtttgccaccaacgccatcgccaaccgtatctacaagccgattccgctgcttctcgtggcctgcttctggtacctgctgatcacctccattctgatggttgtgcagtcccgccttgaggcgcacttcggcaagggcttcgatgcccgaccggtgggcaccaagggcaagcagacgccattgccgggtaagaccgacggtgaaccgaaggatgacgtggacaagctcaaccagaccacatttgtcggattgaatgcataaggcgggagcgcgattatgactacgaatgacatcaccagtgttgccccggtcgtgcgcaaggcggctgacggttccgtgattcctgccgtcgaggccgtgcaggtgcacaaggcgtttgggccgctgcatgtgctcaagggcatcgatctaaccgttatgcccggtactgtgaccgtgattctggggccctccggttccggcaagtccacgttcctgcgtctgatcaaccagctggaaaccctgaccggcggttccatcgaggtgtacggcgaactcatcggctacaagcacgtgaccaaaaacggccaggacatgctgcagaccttggacgataaggagatcgccgcacagcgctctcgcctcggcatggtgttccagcgcttcaacctgttcccacacatgaccgcgctggagaacgtgatggaagccccgatccacgtgcagcaccagtccaagaaagccgcctgtgacctggccgtggccgagcttcagcgcgtcggtctgggcgatcgcatggactattacccctcccagctgtcgggtggtcagcagcagcgcgtggccattgcccgtgctctggccatgaagccggagatcatgctcttcgatgagccgacctccgcccttgaccccgaactggtgggcgaagtgctcaacgtcatgcgttccttggccaaggaaggcatgaccatggtgtgcgtgacccacgaaatcggcttcgcccgcgaagtcgccgaccagatcgtgttcatggacggcggcgtagtcgtagaaaagggcggccccgacatcatcgaccaccccaccgagcctaggtttaaggacttcctacagcatgtgctgtaggaaggctgttatattacctcagcactgtcgtgcttcggcgtcgcctacggggagcccactgggctccccgctttacggctccgcctacagcacgtgctgtaggaaggctcgttgttgcagctccaaaagcgtacgctgatgaactcagcgtacgcttttcacgaaggggcatgttccaatcctgcaaaggcggcgggttggattcgctttgcgcaataatcgtccgctaggctggtgagccatgtgtggaatcgttggatacgcgggaaatattgaaacggcatgcggcaagcctttggaggtctgcctgcaaggcctggaacgtctggaataccgaggctatgactcggccggtgtggcgctgaccgcgcccggcatggataaggtggtcgtgcgcaagaaggccggccgtttgaagaacctggtcgaagacatcgagcgcaagccgatgccgctcgccacggtgggcatcggccacacgcgctgggccaccaatggcgagccgagtgacgtgaatgcccacccgcacaccagcatggacggcaaggtggccatcatccataacggcatcatcgaaaacgcctctcagctgcgtttcgacctgcaagccgaaggctaccgattcgcctccgccaccgacactgaggtggccgctaagctgctcggcaagatcgtggacaagattatcgcggacgaaggcaagccagacttgttcaaggctgtgcgccgtatggcccgcatgcttgaaggcgcgttcaccattctggccaccgactgccgccagccggacatcgtggtcggagcccgccatgattcgccactggtcgtgggccttggcgagggggagaacttcctcggttccgacgtcgccgcattcgtggcctacaccaagcgcgccatggaagtcgaccaggatcaggccgtatgcgtgtccgccgacaaggtcatcgtcgccgatttcaacggcaacgtggtcgaaaacccgaagacctacaccgtggattgggatgcttcggccgccgaaaagggcggctgggattcctttatggacaaggagattcacgaagaccctgccgcagtgcagcgcaccctgcttggccgcttcgacacgaatggcgacatcacccttgatgaagtgcgtatcgacgaacacgacttcaaggccatcgacaaaatcatcgtcgtggcctgtggcaccgccagctacgccggccaggtagccaaatacgccatcgaacactgggtgcgtatccccgtggaaatcgaactcgcgcacgaattccgttaccgtgacccgattctgaccccgcgtacgctcgtggtggccatttctcagtccggcgaaaccatggatacgctgatggccctgcgccacgcgcgcgaacaggggtccaaggtgctggccatctgcaacacgcagggtgcctccattccgcgcgaatccgacgccgtgctctacacacacgccggcccggaagttgccgtggcatccaccaaggcgttcgtggcgcagattaccgccgcctacctgctgggcctgtatctggcgcaggtcaagggcgcgatgttccgcgatgagattcatcagatgctcgactccctgaaagacatgccgcgcaagattcagtgggtgctcgacacccagcccaagaccatccaggcggccgccgagcgcatggtgaacgccaactccttcttgttcctcggccgccacgtgggctacccggtggcgcttgagggcgcgttgaagctcaaggaaatcgcctacacgttcaccgagggcttcgcggccggcgagctcaagcatggaccgatcgcgctggtggacgagggtgagcccgtggtgttcatcgtgccgccgcagcgcggccgcaatgtgttgcacgccaaggtgatctctggtatcgaggaggtcaaggctcgtggcgcgtacatcatcgccgtggccgagcagggcgacccggatgtggaacggtacgctgacgtggtgttctggcgccccgcctgcccaacgctgatgagcccgctggttgacgtggtgccgctgcagctgttcgccatggacatggcaaagctcaagggctacgacgtggacaagccccgcaacctcgccaagtccgtgaccgttgagtaagccacatcggtatgtgattgacgagcctcatattccgtttgagatggacgtgctgtatgaggacgagcggatcatcgtggtggacaagccgcattttctggccaccatgccacgcggcatgtggtatcggcagaccgcgctgatccgattgcgtgagcggctgggggagccggacatcacgccagcgcaccgattggaccgcatgaccgccggcgtattggtgttcgtgcgggattcggcctgccgcggcgcgtatcagatgctgttccagaaccggcaggctgtcaagatctatgaatgcctggcaccctgccggccgatcagcggcccgcgattcggcacgatcatgcaggtcgaaccgccacgcccgttcccattgctgcgccgatcgcacatcaccaaggaacacggcacgatggccgcattcgaggaaccgggtttggccaacgccgaaaccctcatcgagcgcggtgacctctgtttccctcccgctggcgggaggtggcgcgaagcgccggagggtggtccccatccgggaaatcaccccatctgccgctacacacttcacccgcgcaccggcaaaacccaccaattgcgcgtccacatgaattcgctcggcctgcccatcgtgggtgacgacttctacccgcgcatccagacacgcccctacgacgatttcagccagccgctgcaattagtggcgcgtgtgctacgattcaccgatccaataacaggcgagaagcgcgaattcgtttcccgtgtgccgcttaagatctgatttcttaggggggatggcgagaccaatccccgcccgtccgaatcactgtccctttcgactggccatccagctcattgcatcgtcgtacaccatcatgatgcgcttgcgatagctatcgatgaattcctgcgcaccaatgctcgcgataacgtcgtgagcgggttgcacggtgctgtcgaatgcctccggcagcctatccaccaaggtgtggaatcgtaaaatcacggattcctcatctaatcccatccgctgtgcgaatcgttccagatgtttgcggcgtaattgaagaagatctcggcgtccgccgatgttcatcgccaaagtggcatttatgatctgcttgccatgccccaaataagggaacaccgaagcaaggtcatagagcggggcaagccgcgcggacgcgccatcgagcaatagcgagtagttcttggcgtggctgtctgttgccccgacgagataactggcgaggatgccgtcggtgaaggctcggatattgctttcggcctgaccgggcagaccgtgcttgcgcaacatttccgcatatgcattggacgttgggccgttgtgttcctcgtatttcagcgatgagggaatgcccatcgcttgggtaaagtcttcttggtgcagggccgtcaccgtaccattggcggacactatacggtcataccgctcgctgatgatggctgggaccccatcaaagatgtgaaaagaggtgtgggccacgggtattcccatcgcctccacaatgcgcatggtgatgtgttcgttgaatgcttggtgtggaagggtcggtatgccgggcttgatgatatgagtcgtccgcgcgattccagtggtggagaaccatgatccattgcggttcctcagtgcgatcttgccctgctgtcccgcgaccgaccaatgctcgtctacgcttgcggactggatgcctgtgggggcggctgcgcgtagtcgattcgcgatctgcgaatcgctgattggaataagcgaatcgtcatctatgggcaagtgcgggtcggcggacagccgtaatgcgccggtggcatcgaatccgatggcttgcaacagatcaaatgcgcttgtcgatcgggcatgatgcaatcgcatggcttcatctcgggcctgaggggattccgggaccagggcctcaaggaaattacgcgggatgtcgcctgaatattcggctgcggtaatgggcatggaaagcgatattggtgtgggtgattgcgaccaacgataggaatcgtgatattggaaaataatgctgccatcgtttgttcttcgaaactggccgatgggtgtttcgccgagaaatgcattgagagtgttttcgctcatggtgtcaccattcatagagttcggcgggctgcggggttttgcggacatccagcgacaagccaagctcagtcagagcgctgagaatggtggagaatccgggattggggactcgggcgtgttcaaattcgatcagccagcgacgtgacacgcccagccgttgggccatgtcggtctgactgatgccctggcgttgcctttcatccttgataagccgcgcgtattcggcgatatccatgacaatcatgtgcaaaatatatcacagtatagtaaagtgtgcaatattctgcacatagttggaaatgtgcagaatattgcacaaccgagtcgattggtcggtgcggaattgcctatggatcactggcaggtgaatcactgacaggtaccagtggatgccagcacatggctcgtcagctgatgtcgcgcacggaaccgcgttcgatcagttccggcgggattacggttttgacgccgaccggtatcttctcgccttcgcattgacggcggaccatggagaaggcggtggcgccaatgtcgtcaaagcgcagcttcatggtcgtcaggttcaagcgcggaaccatatctaccagcgaatcatcgacgcccacgatgctgacatcctcgggcacgcgcttgcccgctgactgcaacccgagcattgcgccgtatgccatttggtcgttggcggcgtagatggccgtgcagtcggggtcgtgggccaacgccacgccggcctggtagcctgaatccgcgcaccaatcgccgatgtacatgctcggtacgcgtgctcccatttgttccaacgcttctcgccaaccgcgggcgcggctttcggcggcgcgcgaggtggacggtccggcaatgtggtagacggtcttgtgccccttgctcatcaggtaatcgacgatagcggtcgagcagccatactggtcggcgtcaacggtggggcagtggtcggcggcggattcgcagatgagcacgactggaagttctcgcggaggcttgtatccgacgaaatcggagatgcgttcctccagcactacgatgacaccatccaccggctgacgctgcatgcgatcgatggcggcggaaagcgtgcgttccgcaccgtggcgcatggtctggatggtgactgaataatcgtcatcggccgcgttggccacaatagaatcaaggatgcgggcgttgccgaacgcggtggtgttgaacatcaccacgccgatatcctggaagcggccgtgctttagggctcgggccgcataattcggacgatacccgaggcgtttcattgcagcttcgacacgctggcgtgtttcgggtttcaccgcatcgctgccattcgccacgcgggacactgtctgtggcgaaacgccggcggctttcgctatgtcttgcatggacacctgtgttggcctcgacatttcaccctcgcttgactcattaatgtcggtgtttcgtttgcaacgcttatcttagggccgcttacggtaacgataacatcgttgtcttcgtgaccattgtagcagagtgactgagaaacccttaattcaacacggtactcaacacgattggacaatgttacaaatggtgttatggtgataacgcaaacattttggtcaaccttcgaaggagaggggttgggaatggcttcagccgatatcgcagctgcgcccgtgcattcgggcaaggctcgtgtgaataagcacaaggccgattggcgtggatggaaattcatgtggccttttgcggtggtgttcgtgttcgtgttcatcgtgccgatcgtgtacgccgtttatatttcgttcttcaagaagcagatgatcggcggcaccaagttcgtcggcttcgagaactacgcgcgcctgttgggtgatggccagttctggagcagtgttggtcgtgtggccctgttcacgtgcgtgcaggtgccgatcatgctgtgcctgtcggctttgatggccctggcgttggattcgatgaagctgcatggcacgaggttcttccgtatctcgacgttcctgccctacgcggtgccggcggtggtgtcgacgttgatctggggtttcgtgtatggcgcgaagtacggcctggtgggttcgttgaacgatttcctgggcacggacatcgacgtgctcgcccccagcgtgttgttggccagtatcgggaacatcgtgacgacggcgttgttcacgatcgtggcgacgtggaacaactacttcctgccgttgatcatgctcaaggacgcggactggtacccgctgaccatcggcctgaaccagtggaaggaccaggcctcgaccgcgggcggccaggcgatccagaacctggtgatcacgggctccctgatcacgatcatccccctggtgatcgcgttcctgtgcctgcagaagtactggcagtccggactcgccgcaggcgccgtcaaggagtgatggagtcggctccgccgacgcggtgtcttcaccgcctcgcggcggggtccctccctccgtcccggctccgccgagacaaccttcctcatcagagggaggtaaaatagtgccaagccccccctctgacgagctgagccgttaggcaaacagccctgtgggctgtttattcccgcggacgcagattatcgataaaattcaataaaggagctgaatcatcatggaacgtaaagagttcaagtggccgcagccgcttgcgggcaacaagccccgcatctggtacggcggcgattacaaccccgaccaatggcctgaggaagtgtgggacgaagatgtagccctcatgcagcaggccggcgtcaacctcgtctccgtggccatcttctcttgggccaagcttgagcccgaagaaggcgtgtatgacttcgattggctcgaccgcgtcatcgacaagctcggcaaggccggcatcgccgtcgatctcgcctccggcaccgcatccccgccgatgtggatgacccaggcccacccggagatcctctgggtcgactaccgcggcgacgtctgccagcccggtgcccgccagcattggcgtgccaccagcccggtctttcttgactacgcgctcaacctgtgccgcaagatggccgagcactacaaggacaacccgtacgtggtcgcctggcacgtgagcaacgagtacggctgccacaaccgcttcgactactccgaagatgccgagcgcgccttccagaagtggtgcgagaagaagtacggcaccatcgacgccgtcaacgacgcctggggcaccgccttctgggcgcagcgcatgaacaacttctccgagatcatcccgccgcgcttcatcggcgatggcaacttcatgaacccgggcaagctgctcgactggaagcgcttcagctccgacgccctgctcgacttttacaaggccgagcgcgacgccctgctcgagatcgcccccaagccgcagaccaccaacttcatggtctccgccggcggtgccggcatcgattacgacaagtggggttacgacgtggacttcgtgtccaacgatcactacttcactcctggcgaagctcacttcgacgagctggcttactcggcctccctgtgcgacggcatcgcccgcaagaatccgtggttcctcatggagcactccacgtccgccgtcaactggcgtccgatcaactatcgcgtcgaacccggcgaactggtgcgcgactccctggcccatctggccatgggttccgacgccatctgctacttccagtggcgccagtccaaggccggtgccgagaagtggcactccgcgatggttcctcacgcgggtgccgattcccaggtcttccgcgatgtgtgcgagctgggtgccgacctcaacaagcttgctgacgagggcctgctgagcaccaagcttgtcaagtccaaggtcgccgtcgtcttcgattacgagtcccagtgggctacggaacacaccgccacgcctactcaggaggtacgccattggaccgagccgctcgcgtggttccgcgcgctggcggacaacggtctgaccgcagacgtggtgccggttcgcggcccttgggacgagtacgaagccgtcgtgctgccgagcctgaccattctgtctgaagagaccacgcgccgcgtgcgcgaatatgtggcgaacggcggcaagctgttcgtgacctactacaccggtctggtggacgacaaggatcacgtctggctgggtggctaccccggttccatccgtgacgtggtgggtgtgcgcgttgaggaattcgccccgatgggcaacgacttccccggtgccatggaccatcttgacttggacaacggaaccgtggcgcacgatttcgccgacgtgatcacctccgtggccgataccgctcacgtggtcgcctccttcaaggcggataagtggaccggtttcgacggcgctcccgccatcaccgtcaacgacttcggcgacggcaaggccgcatacgtcggtgcccgtctcggccgtgagggtttggccaagagcctgcccgtgctgctggaggaactcggcatcgagacttcggctgaggacgatcgcggtgaagtgctgcgcgtcgagcgtgcggacgaaactggcgagaaccacttcgtgttcctgttcaaccgcacccacgatgttgcggtcgtggacgtggaaggcgaaccgctggtcgcctcgctggcccaggtcaacgagtccgagcacacggccgccatccagcccaacggcgtactcgtcgtcaagctgtaaaaccgcgcatagcgcctaattacccaacggctcccttgctgctcatcgtagcaggggagtcgttttcgtatctccagcaaagtcgggtagggtggtcaccgtgcgaggcaaaaacagagtgacgatggcggacgtggcccatgaggccggtgtttcggtagcctcggtgtctaattttctgaacaaacagccatatatgagcgaggcgctggccgcgcgtattgcggaagccatcgacaggctcggatacaaagtcaactcgtcggccagaaacctgcgttccgggcgtacccggttgctcaagctggttattcccgatctgcggcaggtgtacttctccgaactcgccgaggatattctggccgaggcccggcaacatggctacggcgtcatcgtggaatccaccactaacaatcgtgcccgcgagctggaaagcatcgcatcgatgggcacgcacagcgcggacgggctcatcttaagccctctgatgatgacggttgacgatatcgcggctttggatggcgattacccgctcgtactgttgggtgaacgtttgttcggcgtcaacgcgccgcacgtagtgattcgcaatcgcgaaggggccgccggcgcgaccccgttcgatacacaaagccccgtgacgaatcccgtcacggggcttttaccgttttaagccccgcctagtacactcgtcaccatgcgagtgatcggacagcgaatcaaaagaatggcaaccatagcagtgactgccatcctttccgtatccctggcctcgtgcgggcaggccacggacgacaaccgtacggagatcagcgtatggagctgggaaccgagcatgggggaggtcatccgccgtttcgaaaaagccaatccggacatccgcgtgaaatggaccaatatctccggctacggcaatcttaataccgccattcaagacggttacggcacgccggacgtggctcaaatcgaatactatgcactgttgcagtacgcggtctccggccaattgcttgatctgaccgacaaaatcggctcggattattccaacttctttaccctcggcacatggtcgtccgtgcagctcgccggccgtacctatggactgcccatggattcgggcccgatgggcttcttctacaacgaagacgtgttccgccaagccggcgtggacgccaccaagatcaagacttgggatgactattacgaggccgccgaaaagctcaaggagatcggcgcgtatatcgccgccgactcgggcgacggcagtttctatgacgcgatggtctggctcgccggtggtcagccgttccacacgtcggccgacggcaaaaccgtgaccatcgatttggatgaggatgccggcacccaacggttcaccgaattctggcagaaaatgatcgatgaggggcttgttgacaccacctccgccacatggtcggatcggtggaaaagcagagtgggcaccggcaccatcgcctccgtgttctctggggcttggatgccgtcgctgctgctgtccaatgtgccgggcgcggccggtctgtggcgcgtggctcccatgcccacctatggtgggcagcctgccaacgccgaaaatggcggctcggcgctgaccgtgttgcaactgacccgtaagccggatgcggcctatcgtttcgtggactttgtggcgcatgacgcccaaggcattagcgcgcgtgtagacggcggtgccttcccggccgattacgccaccctgaattccgctgattttctggataaaaccacgattaccaatgaccgtggcattgaaatcccgtatttcggcgggcagaagttcaaccgggtactgtcggaggccgccgaggatgtgtcggtcggataccagtatctgccattcgaagtgtatgcgcgcagtgacttcaaatcgacggtgggccaggcatacgagtggtccggcagtttccacgcctatcagcagcgacaggaagccattgagatgggcatgaaggacgaggaaggcaacccgctcgaaccattggagaagcccggcaagaaagtcagtctctccgacggcctggcccaatggcagaaagacctccgagaatacggcctcaatcagggctttacgattaagtagggttttgagtaggtttttcggggagggacggaatcgactgcgctatgcgcggccgatgcctgcccaccgcgttacttcacattgcgcgagtagatgtatgccatgcctttgaagatcaggtctgaatcgtagacgtcgatcatgtcggtgtcgttcttgaaaatgcggctgagccctcccgtggctaccacttggaacggctcatcgatttccttgcggaactgctgaatcgtgcgctcaatgccaccgaggaacgtgtaatacagtccggcctgcatagcagtgcgcgtattggtggccagaatcgactgcggttgcgtgatctccacttccggcagctgggcggtctgcccccacaacgcctcggccccggtgcggatgcccgtggtgatgaagccggagcgaatcgtgccggaaccgtccacatagttgaacgtggtggcggtgccgaagtcggccaccagcaccgggccgccataggtgtggtaggcgccggcgcagtcggcgatgcagtcagagcccaaggttttgggatcgtcgagacgaatgttcatgccggtcttgacgccagggcccaccaccatcggttccaatccgaggaatttgatcagcgaggcgcggaaggaatacatcaccttcggcaccaccgagcagacgatcacatcgtccacatcgtcggccgtgtaatcgctcaaagccaggaactgcgtgatcatcagaccgtattcgtctgaggtgtgcgtcgccttggtggtgatgcggtaggagccgacgatgcggtcgacctccagaaaaccgatcacgatattcgtattgccgatatcgaccgccatcagcatgggtcaggcctccttgttctcgtcatcgacattgctcgcgccgccggaacgcaacgctgcgagccgcagcaacagtcgttgcgcaagcacggttttgtccatcttgtcccaatgctcgatcttcggggtgccggcatcctccgctccggacgtgagcacggtgacaacgttggtgtcggtgccgaacccggcaccggcgtcgcgcagattgttggccaccagcatgtcgcaatgcttggacgtcagcttcttctccgcattacgaatcagatgctcggtctccatcgcgaatccgcacaggatctgcgagccgtcgtcgcgcttgcgttcgccggcccacgccagaatatccgggttggaaaccagctccacggtgatgctgctgcggccggccttcttgattttctccggcgcaatctcggccacgcggaaatcgcccacggcggcggccataatcgtgatatccgccgccgggaaggcgtcggccaccgcatcgaacatatcctgcgcggtcgtgacgcgcaccacatccaccgcatcgggcgcggtcaaggcgactggaccggagaccagcgttacgtcggcaccaaattcggctgcggccgaggcaatcgcataccccatcttgccggtggaatggttcgtcagatagcggaccgggtctagcggctcctgcgttggcccggcagtgaccagcacgcgcagccccttgagcggggaagatgagggagcctggtcatcctgcgcatccgccagcagccgagcggccacttcctcgatgcgcgccggctcttccatacggcctcgtcccacgtcgccgcaagccagattgccttcctccggctccacaatctgccagcccaattcggcgcaggttttcagattgcgctgcgtggccggattgttgtacatatgcacgttcatcgccgggcataggatcttcggcccctcataggccagaatggtggacgtcagcgtatcgttcgccaatccacaggcgatgcgggcgatgacgtcggcgctcgccggggccaccaccagcagattggcccaggccgcatcggccacatgattgatggtcgttggcacggtcggattggccgtcacgtcgccgtgcgcggccggataagcggggaacatcgtggtacgggtgggttgatgggtcagtgaggtgaatgtcaggggagtgacgaagccttcggccgctgtggtttcgataacccgcacctcgtggccggccttggtccaatcggatgccagatgacaggccttgaacgcggcgatgctgccggtgacgcccagaagaatatgtgccatagctgcctcccggccttatgccaaggccgcacgtgtgcccacgccagcgcttcccgcgtcgttgcccgacgatgcgccgcgtgttgtggtcgccgcggaccctccgtcggcgccgcaatccagtatagccattgcctccggcgtgtccggggatatagtagaacgtggtgatcgacccgaatgggcggtcaaccacgcaagataacaacgaaaccatattcgggcgtaagcatgcccgaatgcatcagggagtatccatgtcccagaacaatggtgtgcacggcgagtccggcgcaaccgaagacaggaacatcgacggcgcgaatcaagccgccagcaccgacgcgagcctgaacgcgcgcgcgaaatcatcaaacaagaagaacggcggcccgaaatggtggctgtggacgctgatcgcggtcgtcgtggccgcggcgctcatcgtgggcgtcaccgtcttcggcgggaaaggcaagggcaaggacgcgaacgcctccggctcggccagccgatccgacaccgtggccgtcggcctcaaactcgccccggtcaatcttgacatccgccaccagtcgggttcggcccttgagcagatcctcatcggcaacgtgtacgagggtctcgtctcgcgcggctcggacaacaaggtccaccccggtctggccaagagctgggagatctccaaggatggcctgacctacacgttccacctcaacgagaagatgaacttctccaacggcgacaagctcgacgccgaggacgtggcgtggtccatcaacgagctcaaggcccagaagtactacgactacgagcaggtcaagagcctggacaaggccgaggccgtggacgccaacacggtcaggctcaccctctccgcgcccaactcgaacatgctgtggtacctcaccagccgtcccggcctggtctacgacaaggacgccacctgggatcagaagaacggcgcgttgggctcgggtccgtacaccgtggtctccttcgacccgaacgacaagatcgtgctcaaggcgaaccccaagtattggggcaccgagcacaaggcgaggaccgagaacgtgatcgtccggttcctgccggacgagaacgccagcatcaacgccctcaagagcggcgacgtgcaggtgctttcgtccatcattcctgcgacccttgccgagccgttccgcaaggatccgaactatgtggtcaaagttggtggcggttccgacaagttcgtgctcgccttcaacatggccaacgacaagctctccgacaagcgcgtccgccaggccatccgatacgccatcgaccataagcagatcatcgcctcgcgcggcggcgtggacgcccccctcggcggtccgatccccgagatggatcccggttacgaggatctgagcggcctgtacccgcatgacgtggccaaggccaagaagctcatggaacaggccggatactccgagtcgaagccgctggacctgaccctcacctacgccaacgtgtatggcaccgagctcggcgaccagctcaagagccagctcaagcccatcggcatcgacctgaagatcaactacgtggagttctccacttggctgcaggacgtgcacgccaacggcaactatgatctttcgctcgtggaccatgccgaaagccacgacttctacggatggaccacgccgagctactacttccactacgacaacaaggacgtgcaggccctgtacgccaaggcgctggaggccacctccgacgacgaggcctcgaagtatctggccaaggccgcgaagatcgtctccgaggacgcgccggccgactggctgttcagtttgaaggtcaccatcgcctacgccaagggcgtgaatggtgtaccgcaggacttcatccagaccgtgctgcccctctggcggatcacctacaccaagtagtcccggaacccatcggtcgggcgcggcgcgggagtgattccgtggcacgcccgaccgtggacggcccatccggccggtgacgccacgggcggtggcgagggaatcgataagggaggcgttatgcggttcttgatgcaacgcttgctgctgttcgcggcggcgctgttcggcatttcggtgctggtgttcgcgatgctgcgcatcctgccgggcgacgtggcggtcgtgatggccggcatgaacgcatcgccggcgcgtgtggcggccctgcgcgccgaattcggccttgaccggccgtatgtcgtgcagtatctcgactgggccggagggctgctgcacggtgacttcggcgtgtcggcgctgaccgggcgggcggtgacctcccaggtcggccaacgtgcgacgatcacgttcccgctgatcgtgatgagtctggccatcgcgctcaccctcggcttgtccatgggcgccgccgccgtgatctcccggtcgccggccgtgcgcggtttcctgcgcgtgctgtccatcgtgggcggcgccgtgccggccctgtggagcggcctgctgctcatcctcctgttcgcacggggcgtgggccttgtcggtctgctgccctcgcaggggttccccgccgctgggtggggcgctcccgggcgggcggtctcgtccctgatcctgccggcgcttgccaccggattcgtgtccggtgcgggcatcatgcgttacacgcgctccattctggaaggcatcgccgatgagggaggtccgattgatatggccatgtcctgcggcatgacccgcacccaggcgttggtgcgcgtgggattgcggttggcggctccgcaactcgtctcggtggtgggactggcgttcgcctcgatgatcaccggcgtgatggtggtggagaacctgttcgccctgcccggtctgggcgccctgttggtgggcgatgtcggcaaccgcgatctggtggccgtgcaaagcgagttgttcctgctcgccgcgttcttcctgctgatcggcctggcggtggatctgctgcacgcgctgcttgacccgcgtctggccgccggaaaggaggaatgatggttgatcgcaatggtcgatggcgtcgttcgggcgtggttctgggcaccatctggtcccgtggcaccggccgctactcgctgatcgtgctggggttgtggatggtcgtcgccctggtgtcgttgttctggaccccgcagtcgctgctggccaccgacggctaccacgtgtgggataagccgtcgtccgcgcattggctgggcaccgacggcaccggcgcggatgtgctgagctggctgatggccggatcgcgcacgaaccttgccatcgccctgctcactgttgtctgctcggctgccatcggcatcctactggtcgggctgatggtcgcccgttcttcggcgctcgcttcggcgtcggtcgccgtggtcgacgcgctgatctccatccccaccgtgctcatcgccctgctgctcgccgtgccgttcggcgcatccgcggccgtggtgatcggcgcatgctccatcggctacgggctgcatctggcgcgcgtcgcccgcccggccgccctgctcgccgcccgctcgggatacgtgcagtcggcccgggcgaacggtgccagcgggttcggcgtactggtcagacacatcgtgccgaacatcacgccggtgctgatggtgcaatcgtcgatgtcggcgggcacctcggtgctggccgaggcgggcctgacctatctgggcgtgggcgtcggcgcgggggtgccgagctggggccattcgctggccacctcggtcaaactcatcaacgtgtttccgttgacggtggtgtggcccggtctgatcgtcaccctggtggtggtcgcgctgaacctgttcggcgacgcgttgcgcgacgccaccgacccggtggctaatcccgcgttgcggcagatgactgtgcccggtgcggttgtgccggtggctaggggagccggtgacactgcggcgcagtccgcagtggcagcgccgaaggagacggatgatgagcgttgaaattcacgggctgaatattgctatcggcggcaaaccgattgtcatggatgtcgatctgtccatcgcggacggcgaacgggtcggcctgatcggttcctccggctccggcaaatcgatgatcgccaagtcattgctcggcctgttgccgcgcgaggccgtgctgtccggcaccatcacgatgggagaaaccgccatcctgtccggagaaaccgccgagtcgcggcatgggcaggaagatgactcaggatctgacgaagaacgcggcgcggcagataggcaccatgttgccggtgaacgcagggttgccacctcgggccacgattccgctgcgtacgccgacgagcatacgcttgccgatctgcgcggccggtatgtgggtacggtattccagaatccggcccatgcgctgaacccggtgatgaccgtggcgcagcagattgcgttgccgttgagactgcactacgatctgaccaaggccgaacgtgctgagcgagtgaataccatgctggacaaggtcggactggaccgtgacgtggccggcacatacccgcacgaactgtccggcggccaacagcagcgcgtgggcatcgccacggcgctgatcacctcaccgcgattcatcatcgcggacgaacccaccaccgcgctcgactccatcacgcaacgtcagatcgtggacctgctgacctcgttggtggacgacgccggcgcatccatgctgttcatcacccatgatttctccgtactcgcgcgtgccaccacccgctgctacgtgctggacgccggccgcatcgtcgaatccggacccactgccgacctgcttgctgcaccgaccacgccgcaggcccaacgcttggtcgccgccgcccaaaccctcaccctccacacccccaaggaggattcgcatgagtaacagcagtgtgccactcttctccgcccactccatcaccaaatccttcggaccgcgcaccgcacgccaccaagtcctcttcgacgtctccgccgacgtccacgccggcgaatgtctggccgtgatcggcggctccggatccggcaaatccacgctgacccgcattatgctgggcttggaatccgcggactccggcagcgtggaatacgagagccaatccattgtcggcggccgaaaatcgccgggattcgcgaccctgcgccgcgaatcgggactggtgttccaggacccgttctcatcactcgacccgcgttggcaagtcgccaaatcggtggctgaaccgctgagtctgcagcgacgtgatctgaacaacaccgatatcgacgagcgggtggtcgcggctctgaccatggcgggtcttgaaccggcggacttcctgaaccggtacccaatcgacctgtctggtggccaggcgcagcgcgtggtcatcgcccgcgccatcatcaacgagcccaaggtaatcctcgccgacgaaccaatgagcgccatcgacgtggccgcgcgcatccagatcctcgacgccttcgccgctatccgtgaggcccggccgagcaccgccatcatcatggtctcccacgatctcggcgtggtgcagcacatcgccaaccgcatcctcgtgcttcacgacgggcgcgtcgaagagacgggtcccaccgccgaagtgctcggcaacccccaatccgattacacccgtcagctcatcgaggcagcctcgatatagatctttttggctcccctccctgaggggagccggccgccggcgacacgcgcttgtcgcgggttgtgctatggtgtgaagcatgcagattatctcatgttgttgtcgctaaccgacgcccctgggcgagcggtcagtgacgcataacttgagatggagcattcgaatcgcggcgaatctgccgcatacttttcatgtatccgatggcataagcgtaatcgtgtaatgcgcgagccgtggttaacatgaaaaactgattcacttttcggattcaccgtacagtgagcgggaatactcgattttcaaaccaaagccacagtccattcgtctgggaacgtcggttcacgaacgcaacgcagcaaaacccccacaaccccagcaacgaaggacttcacatgaccatccacaacagcctcgcagaactcatcggcaacaccccgctcgtcaagctcaaccacatcccgcaggcggccggcgtcaaagccaccatcgccgtcaaagtcgaatacttcaaccccggcggctcctccaaggaccgcatcgccgagcgcatcatcgacgccgccgaacagtccggccagctgaagcccggcggcgtgatcgtcgagcccacctcgggcaacaccggcgtcggcctggccctggtcgcccagcagcgcggctaccgcacgattttcaccctgccggacaaggtttccgaatccaagcgcgcggtgctgcgcgcctacggtgccgaagtcatcgtcacaccgaccgacgccggcccggacgacccgcgctcctactaccaggtcgccgaacgactggccaacacgattcccggcggcttccgcccgaaccagtacgacaacccgaacggcccgctgagccactactacaccaccggccccgagatctgggaggctacggaccacaaggtcacgcacttcgtggccggcattggcaccggcggcaccatctccggcaccggcaagtacctcaaggaagcctccaacggcgcggtcaaggtcatcggctccgacccggaaggctccatctactccgcttcctcacgcgacgaagtccaccagtacgacatcgagggcgtgggggaggacttctaccccaaggctttcgaccggaacatcaccgacgacatcgtgcgcgtatccgacgccgaagcctttgaaatgacccgccgtctggccggcgaggaggcgttgctggtcggcggctcgtccggcatggccgtggccagcgccatcaagtacgcgcttgccaatgatttggacgagaaccagattgtggtggtactcgcccctgattccggccgcagttatctggagaagatcttcaatgacgactggatgcgtgccaacggctacggcgacatcgtggaacacaccagcaagccctccctcgccgagcagtaccttaacggaactccctctgatgagggagctgcggatggactccataactagctatcaaaagaatcaatactaactaaccgcacctgttttaccttcgaatacggaacaatcccgaaaggaacccaatatcatgtccgctgaatacaacgccaagttcgccaacaccgacatcgccactcgcgccatccacgccggccaggagcccgacccgaccaccggtgcggtcgtcacgccgatcttcgccacctccactttcaagcaggatggcgtgttgggcctcaggggaggccacgactactctcgctccatcaaccccactcgcaccagcttcgacgagcagctcgccgccgtggaaggcggcaagtacgcgctgagcttctcctcgggcttggccgccatcgacgtgctgctgcgctccaccatcaagcccggcgacaacatcctgctcggcaacgatgtgtacggtggcacctaccgcctgctctccaaggtgttcgtgccgtggggtgtgggcctcgacgtggtggacatcaccgatctgaaagccgtggaaaccgcattggcctccaagcactaccagtatgtgtgggtcgagaccccgtccaacccgctgctcaacatcaccgacatcgcggccaccgccgaagttgcccacaagtacggcaccaaggtcgcggtcgacaacaccttcgcctcgcccgcccttcagcacccgctggccgatggcgccgatgtggtggtctactccaccaccaagtacatcggcggccactccgacgtggtcggcggtgccgtggtggtcaacgacgaggagacccgtgagaaggtcgccttcctgcagaacgccgccggcgcagtgccctccccgttcgactcctggctggacatccgcggcctgaagaccctggatctgcgcgtcaagcgccacagtgccaacgccctgaaggtggccgaatggctcgaatcccagccctctgatgtgattgagcgcgtctggtacccgggcctcgagtcccacccgggtcatgaaatcgccgcccgccagatgcacggcggcttcggcggcatcgtctccgtgcagctcgcggccggtgccgaggcggccaagcacttcgtggaccacacgcagattttcacactggccgaatcgctcggcggtgtggaaagcctcatcgaggtgcccgccgccatgacccacgcctccgtggccggcaccaccctgcaggtgcccgccaatctggtgcgtatttcggtcggtatcgagaacgccgacgaccttatcgccgatctcaagcaggcgttggatcgtatctgaccgtactgacggtactggtggcaccgtattgacggtgccaccacgcttatcggcggactcgctatcgattggtacctacaaaaaatccccggcccacaagggtcggggattttccgttatcgattaaacatggatcgaatcagctggcgttgccgccctgccatccggtggcatccgcaccagccgggcgcaacgcctgaccggaagtcggtgtggtgccatcaacgaccacacgagtgccgatggtggcaaagtcgtacatccacttggcgtcggccacctgcatgttgatgcagccgtgcgagcctgggataccctgctgcacatagatggggtgctcgccccacatgtatgcaggaacaccgtgcagggcctcgccgccgttatagtaggaaatccacggcgtgcctggctggttgtagccttcgccaaccatggtctgcgattcgtacttgagatacacgtagaacgtgccggtatcggacagcatggaaccatcggcggtgggcttgccagaagcgatgttgaacttcttgaccaccgtggtgccctgatatgcagtggcagtctggttcgtcagatcaacatgaacccacttatcgccatttgccgtatcgaagttatgaggcacctcgacctgcttgacatcatatgggctgtctttcacagccacagtggaatcagtggactggttctgctcgatggcggtagccagacgttcgggggcgtccccggcaccagtcacttcaataccatccacaccgagtgtcttatcggcaccaatttccacgccgccttcgtctttcggcgtgatgtagacctcgcgtgtcaccttgggaacggtcagttctttggttacgctgtcactggtgacgtacttggtgatggcatcgcggtcgactaccagactcatggtgccacccgccttattcaccgtgggcttgaggaatgaggcaatggtatcggccgggatggtgacgctcttgttcacgccgttgtccacggtcagtttgaggccaagcttggcattggcgtcaaactgtgtttgctgtgcgctcgcgtcatcaatcggattctttgcagtctgtagcttgaccggcaccgtcgcattttcgcccggggtcgcgacggcctccttgactgcagcattgacaacattgatatccgggcccttgccatcctgacccgcggtgtaatcgaactgcttggtgctcttgttgtagacaacggtggcaatctgcgctcggtcggcctcatcgaccaggccggcggtgacgaattgttcggcagtctctttgtctctggtggcggtcagagcgatatgcggctgatcgaaaatattgagcttggccacgtcgccggtcttcgcgttcaacagcgcatctacggttttatccgtgtcgacggtgacgccaaggtccttcagcgaggctttgacgctgttgccttcggcggtgaacgtcactgtggtgttattcagctgctgcttcacagtattcgcaagttcttcgcgggtctggcccatgacagagacattgcccaaatgaacaccgggcgcagccttgtcttggaagtaccaacgtccgacgaagaaataggctattaatgcggcaagcaacactgcaaatatggttatgatggcaatccgtgcggccttgccatgtgatttagcggtggtagatgccataacatgttcacccacataggctgtattgtcggcatggttattggtgccattgtcgctttgctgtggcgtggcggtacctgtggccgcggctgcgaacagcccatcggcggccacaggctgcagcaccgccgtctcctgatcgtcaggcgaggagaaggaaaatgtatcgttggccataaaatgccccgtcttagttctctcaaagcggcatatcgtgtgatatgccgggaataacgtttcttgacgcataataatacggaagggctacgtacatcgttacgaggtattccgttatacgatgaaatccatccgcggtcggcctacactggtcgtttatgacagcacatcaggcggcgctggaggcgctcacacgatacttcggc

SEQ ID NO: 3100 - DNA, 147015 bp, Unknown
  R215_18m  MAG No. k141_7291
cgcttgttcaggaagtcgatgtcgacttggtcccagactcccatggagtctaggagggtgccatcgaggtcgaatatggcggctttggtcataggacactttccttcaacagttctcgggcgtggtctagtgaggcttcggattcgctgccggagagcatgcgggcgatttcgtggacgcgggtttcgccgttgacttcggcgatggtggtgaccacgcccaaatcgtcgtcatcggcatccggcggctccttggtgaccacgaactgcgcgtccgcccacgaggcgacctgcgccaagtgggtgacgacgatgacctgcgcgctgcgggccagccgtgccagacgtttgcccagttcgaccgcggccttgccacccacgccggcgtcaacctcgtcgaagatgaaggtctggtcggcaccgccgcgcgtgtcggcggccaccagctccaaggccagcatcagtcggctcagttcaccgcccgaagcgcttttgcccatcggcaactgcggcgacccctcgaacggcgtaaacaggaacgcgatatcgtcgcgaccatacgggccgagcggatcatcggccttgtctcgcggcgtgacgcgcacttccaaggaggcgcccagcatggcgagcgagccgagttcttcagtgacgcgcgcgcccaagtcggcagcggcagccacgcgcgcggcgctcagcacgtcggcggcggcgagggccgcatcgtacagcgtctgccgttcggattcgagttcggcgaccttttccggcgaggcgtccagatcctccaaatcgaacgccgccttgtcccgccaagcgagcacgtcggccaaggtggggccccaccgacgggtgaggtcgccaagctcgtggatacggccgttgatctggtccagatcctccacgctgccttcgtcgcccagctcccggctcagggcgaacaccacgtcgcccaaatcggcattgatggattcaagccgatcggcctgctcggcgaacgtgccgccgacgcgaatcgcgcgcaacgaggccaccgcatgattgatgagttccacggccgaagcgccgtcggcggcatccacatccacctgcgaggcatccagcgcgcccagcgccgaacccacgccttgggcgatgtcggccgcgttttcgatgcgttcgcggcacgctttcagctcctcgtcctcacccggctgcgggtcggttcggttgatgcggtcgatggattcgcgcaggtagtcggcctgttggcgggcagaggattcctgcgagcgcaggcgttccagccgctcatccatggcggccagcgcatcccacgccttgcggtaggcggccagttcggcttcgtctccggccacccggtccagaaactcgcgttgccgtgcggcggccgcgattttcagctgatcggtctggccatgaatggtaaccagttcgccggcgatggcccccagcaccgaacgcggtacggacttgccgccgagcacggcccgcgaacgtccggaagcgcgtacggtgcgggaaaggaacagttcgccgtcttcggggtcgacgcccgcgtcatgggccttggccacggccacggcagcaccggtgaacccgctgtcggcatcgtcaccggcatcgttggtgtcgccggaatgttcagatgcgacggcatcatccgagagcgcgaaaatcgcctgggcccaagcctcgtccgccccggccgagacgcgcgaggattcggcggccccaccggagaccagtcggatcgcggagagcagcatggatttgccggcgccggtctcaccggtgatggcggtcatgcctgcggccggcgcaatggtggcttctcgaatcggccccagattgcggatatcgagttcttcgagcatcaggctcctgccttgccgtcacgttcgcccggcttgtcgggatcggtaccagcgacgccagcgtcaccggcaacgccagccgcatacgcggccgccgggaacgtgtgcccgtgatgcagcggctggctcgaggcctcgttgcgcgcgtgctcgcgccaaccgaccacgggcagatcgaacttggagaccagacggttggtgaacggcacgccggagagtcgggcgaggcgcaaggtatcgcgcgattcgcgcaccatgacgcgcgtaccctgcggcagggcgcgctgacggcgtccatcgcagcaaatccagccttcggacatggaatcgtccagaatatcgatggtaaaggtcgaaccggagccgatgatcagcggcctggcgaacagggcatgcgcggccaacggaatcaactgcagggccttgacgttcggccacatgaccggaccgcccgcggagaaggcgtaggcggtggaaccggtgggcgtggagacgatgacgccgtccgcgccgaacgagttcatctccacatcgtccacgcggatggacagttcgaccatcttgccccggtcggcgcgttccagcgtgatatcgttcagcgcccaatcctcaatgggcttggtggtgccaggcagccaaacgtccacatgggcgatcatgcgttcgtcgatcgaatagtcgtgggtggcgacccggcggatcgcctcgtcgatctggaagctttcgaattcggccaggaagccgacatgccccatgttcacgccgagaatcggcacctgggtgcagtggacgagttcggcggcgcgcagtatcgtgccgtcgccgcccaggaccacgacgatttcggtgtcgtccgacacgcacggcggctgcacgccgaaatcgggggcctcggtgttgtcgatgatggtgacttcgaaaccggccactcgcagctggctcaccgcctcggccactacggttccggtctgcctgagcctggtatgcgtcaccaccaccgcgttgcgcttggccatggcatcctcctgtcgattcggtcgcactgctcattattctagccgcagacaccgtcatcactcgtacaggtgttcgaaaaatgccgcttcgtggcgcgtcgccgacaacgttccgcagagtcgattaacgtaaggcttcgacatacaatggcatacagccgcgcgatcaccgtacgcgtgccgtgcgcagcgcgatggcatgccgtatgaccatacagcagtatcagttgaggagcttgaggacccatggccaatgacttcgacgaatcctccgccaatgaggaggcctcgaagggcctgtcatggtggtattcggccgatgtactgagccgagacaaaagcgataaaaccgccaagcgcattcgccgcatcagcatcaccgaccgtctgctcaggcacccgggccgtctgtccatggtgtatttcggcgcactgatcatcatcgtcaccggcttgctgctgctgccgatctccacatcggacatcatcttcaccaacttcccggtcgcgttcttcaccgccgtctcggccctgtccacctgcggcattccggtggtgaacaccggcgaatactggtcgacgttcggccaagttgtcatcctattctccatccagttcggcggcctgggcgtcatgaccttcgcctcgatggtggctcttggcgcttcccgcagactcaaggtctcccagcgcatgcttaccgcgaacgaactgggcaccacgaagctttccgaggtcaaaggcgtactcaccgtggtattgggcacctccatcatcgccgaggtgcttaccttcgtgctgctgctgcccgacctgttccgcgtgaaccacggcaatatgggacgtacattgtggcaggcgctgttctacgcggtatcggcctacaacaacaccggtttcacgcctgacgccaccggcctgcatgtgaaccgttggggcgtgggactgccgattctcatcagtgcattcataggaacgctcggcttccccgtggtgctgaatctggtgcagtgcgcacgccgacatctcagcccgaaacgttggacgttgcacaccaaactcactttggtgaccaccgctgtgctggtggccacctcactggcttggttcctgctggtcgagtggggcaataccggcctgttccccgcagacggtcccggcatgaagatgcgccgtgcgatgagcgccgccgtcatgccccgctccgccggtttcgatatttcctgggtgcccgaagtcacgaatgagaccaaggtgttcatgagcatactcatgttcatcggcgcgggctcctcatccaccgccggcggcatccgtgtcaccacgttcgcggtgattctcttgatttgccgcgccgcattcaccggccatcgcgatgtcaccgtgttccgccgccgtatcccccgccgcatccagatgaccgccgtgtccgtgaccacggcctgctttgcgctggttatggtcggtgcgatgatgctgatgttcgccaccggctgcgcgttcgtggacgccgtgttcgaggcctgctcggccttctcgttgggcggttattcggtgggcgtggcaagcgccggcaatccggccagcctgtttattctgtccgccgagatgattgtcggacgacttggcccgttgaccatcgcctactccatcagcagaccgatggctcccgaacctattcgttatccgcaggaaaacattatcgttggctgatcggccattcaatcggcacacagaaatccggcatagagaggaccatcatcatggcagcaaaaccgagcggcaacaaaagcgtgctggtcatcggcctgggccgtttcggcgggtccgtggccgccaccctcgaccagatgggtcaggatgtgctcgccgtggataagaacccggagcttgtggcccgttggtccgcgcatctgcccaccattcaggccgacatgaccgatgtgctggccatcgagcagatcgacgcctcccagttcgacacggccgtcgtggccatcggcgacagcatcgaggcttcggtgatcatcaccggcaacctgctggatgccggcgtttccgatctgtgggccaagtccgtgtcccaggagcatgcgcgcattctgcagcgcatcggcgcccgtcacatcatcaatgcggagaccgatgccggcaagcgcgtgggtcatctggtggccggcaattatctggattacatcgaaatcgacggcccgtacaccgtcgtcaagatccacacgcccctatacgcggtgggtcgcagcatcgaggacgtgcaggtgcacgacaaatacggcgtgaccgtggtgggcctcaaggccccaggcaaggagttccagtacggctccaaggaactggtcatgcatcgcaacgacgaactcatcctcatgggcaagcaggatcagatcgaccacttcatccaaggctaacccccctaactgcgctcgctataccccctatctgctcacatcgtgaccgatataacccccctcaacatggatgcgctcattattggggcaataagccataaagctgtacgtccatattgagggggctttatcatcatgggcaagcatacgcagaattgcacgttgataggcaaaggagtctacggcactataggagtggaccaacgttcccgtcttgccgatggcgcgcattttcacaccatgattgtgaccagcaccctcgaggcctcagttatagaaggggacaaactggtcatcaagagtggcattgtgcggtgtgatggtgatattcgcgtatccggcatcagcggcagcggcgacatcgaagtcggcggcgacattatttgcgatgaaataacctttaccggcaaactgcgatgcaacagcgatatcgtttgttccggaaatctgtccgtcaatggctccctaggcacccgtcatattagcggtcagacagtccgcttgaacggcgtgttgaagggtcatgacgtcaacagcagggctctggaagttcatccactgcgcagtacgatgttttctcgttttgatatggatgggtatgaggatggcagcatggttcgccatatcacagccgtcacggttgaagccaaccatctgcaatgccggactttgacggcggactccgccatgctacgcaacggcagtgcggtggaaagcgccacgtgtgccaccgcaataggcatcgaccgtacctccagcgtgctgctggtgaacggagactgccgacgcattcatctcaagacagcgtaaagcaggtattcctcattaccgtgggtgccgatgatgggactatcggcagtggccaccacgtcaagtccgtgctgttcagcacaggcgaccacgtcgtgcaatgcccgctcccgcaatgccggatcttccacgatgccgtttttgccgagtcctgcccgcccgacctcgaactgcggtttgaccagtaacacaatctgcgcaccgggagccgcgatgcgcgcgattaccggaatcacataggtcagggaaataaaggagacgtcggagacgatcatcgccggccggtaaggcaggtcgtcggcctctacttcgcgaatgttgacgccgctcatttcgatgacgtgctcgtcattggcgatgcgcgggtcgagctggccgtggccgacgtcgagcgccacgactttggccgctcccccgcgcaacagtacatcggtgaagccaccggtggaggcaccgatatccagacattccaagctttccggcccggtaaggccattgccggcaaaggtctcgaacgcgcccaagagtttgtaagcgcctcgggagacgtagtcgtcgcccttatccacggcgagttcgctgtgcccggctttgaccatgaacgatggcttggtgatggtctcgccgtccacgcgcacatgcccggctttgatgagtcgctgcgctttggcccgcgattcgaccagtcccgaagccacgagcatcatgtcgaggcgatcaagtggggtcgcgggatcgatatgttgctcggtcatataccttcctttcgacccaccatccaccaacggggtggctcggcatggacccaccatccagcacttcacgtcatcttccgctggcgggagaatgaatctcctctgctagctgcggctgttatcaagctcgtgttgtaacgattccagcacgttgcgataggtctcaagcttgcggtcgttgtcttgttcatcaatatccgcaagttcggggtatcgctcggtgaccggcgcgtgttcgctatccgtaggcataggactatgcctcgatggcgaacaccggtaccgtggcctcgctgagctgtgcgccttggtcggcggcttcccatgcggcgcatacggcggcacgcaggccgtccatactggtggggtcgctgacgtgtacctggccgttttcaaaccaagcgctagccttgcggcattcccaagtaccgctctcgtcgcggaccggctccggttgggcttcgccgagttcacgcagatcaagggcgatgaatgtgggcctcaggtgtgccggagccagcatcagttcggtcgggttggtgacaccggtcagcaccgccagcgaatcatagtcaccgcggttaccggcctcgatatcagtgtcgagtcggtcgccaatggcgatggacgcctccttgggcaccagatcgtggccttcggcggcgttcagttcgcgggcctcatcgtacatgtacgcttccggtttgccagcggaggcgaccggttcgacgccagtggccgtgatcacggcgcgaatcatcgatccgcaaccgggggcgatgcccagttcacgaggaatcgtcaggtcgcggttggtcacgaaatacgtggctccggcctcgaccgcgaacgcggcatcggccatcatctgccaagtcatatccggataccagccctgaataacggcctgcgggcggtcctgaggaccgtccacgatggtcaggccgttgcgggtgacctcatcgcgcaaatgctcggcgcccaatacctgtacgcgcgcgccggcgggcaacgccttggccaccacacgggcggccaccaccgaagaggtgatgacctgccacggctccacgtccaagccgaagcccttgagctggtcggccaccacgtgctggaagcgcgaggagttgttcgtggtgtattcgatggtcatgccggcggcttcggccgcacgaatggaatcggctgcgtattcgaccggattcttgccgcgatacaccacgccgtcgaggtccagcagcgcaagctgataggcctcggcgagcgggcgatcggtgcctttgaggaaacgggtcattacgccgctcactcctcggtttcggtctcggtctcgtcggactcagccggttcaacggcatcgtcagcggactcggaagactcctcggcttcagattcctcagattcttccaatgcatcctcggactcagcattttcgacatcggcctcatcagactcggcatcgccgtcttcagcctcgtcgtcctcatcgccgtattcctgctccagatccggggcgtactgcgcctcgtccggatcgatgccgagcttctcgagcacgtcggagtcgtcggtgatgtcttcgagatcgtggtcaatcaccacgtcgtcgctgttttcgtcaatctcctcgtcggcatactgatcctcaagacggtccagcaggtcattaagctgctcggcttccttgctgcggccggcctcttcaaggaagtactgctcggcctgcacggcacgcatacggtactcacccggaagaccctgagagcggccgacggtatgaaccacttcaatggccttgtcccacatctccaaatcgccaagggcaccggcatacaccaggaacatctcgaccttgggagcgccatgcagctgcttgccctcatcggacagcgccagttccacggccttcttcggttcaccgacaccacgctcgcagtcagcgatgaacggcaggtagtcgaggaagccgttcatacggtaggcggtacggaactcacgcagggacagcttgtagtcgccctgacggtaggccacgaacgcgagcgtctcgcgggcaaagtcgatgcgggaggcctgacgggccacccacttggcgtgctccaaggcaagttcgggatcgctctcctccagcgcgaaagcggcgaggatgtgcagaccaatgttctccgcatgctccttggacaggccgcgcagacgttcgcgctcatccttggacagcatcgaccattccatgcccttgggcatcttgggctcgtcgggacgacggtcggtgtacgggttctgcgaggggaagctcatcgtgccgtcggagttacggcgcggacgcctcatgtattcagagcgcttctcctcacggtactggcgcttctcttcctgcgaaaactcgcggaattcgccgtcacgacggttgttgtcgcggcggtcgtccctgcggaagttgcggcgatcgccatcacggcgatcgtcgtcgcggcggaagttgcgacgttcaccatcacgatggaaatcacggcgatcgttatcccttcggtcatcgcggcggaagtcacgacgatcattgtcacgacggaagtcacgacgttcaccatcgcggtggaagtcacggcgatcatcgcgacggaaatcacgacgatcgttgtcacggtgctggtagcgcgggttctcgccgttctcgccttcgtgggaacggtagccgccttcgcggcgcggcttgaaaccttcaccgtcacggcgcggaccactgccgcggtaaccacccttgtggaagccaccggacttgccgtacgacttgcggtagccgccgtggccctcgccatcaccatcacggcgcggcgcgtaaccctcaccatcctcacgacggcgcggcttgaagccctcgccatcgcggtcgcggcgcggacggaagccgtcgccatcgcggcgcggaccgttgccgcgatagccgcccttgccaccgaaaccagagcggccgcccttgtggaagtcgccacccttgccgtacgacttgcggtagccgccgtggccctcgccgtcaccatcacggcgcggcgcgtagccttcgccatcctcacgacggcgcggcttgaaaccttcaccgtcatgacgcggcttgaaaccgcccttgccgcgcggcttgaaacccttgccaccgcggttgcccggtcggcgatcgccataccccttatggccgccgccgtaggacttgccggaacgctcgttaccttctgccattacttgttttccttaattcgttgttgattaacggttttccacggcgccgagcgccttcttgccacgacggatgagcgcgaagcggccggccaggaagtcggcttcggccagcacctgctcctcatcctcgatacggttgttgttgagatacacgccaccggacttgatggcgcggcgtgcctcggaagcggacttgaacagtccggcagcctgggcggcgtcgattacgcgatcgcccggcttggagacggggaagacgtgctcgccgttctcgtcgaccaccttgaagccgtcgagcacggattccagcgtttcctcgtcgatgtcttcgaggttgccaccgcggccgaacagcgcaccggaagcatcgatggcagcctgggtagcggcctcgccatgcacgaagctggtgacctcccaggcgagggtcttctgggcctcgcgcttgccggggttggtcttggattcctcgaccagtcgttcgatttcggccttgggcaggaaggtgaacgccttcagcaggctttccatctccacgtccgggcggttgatccagaactggtagaacttgtacgggctgagcatcgtggcgtcgagccagacggcgttgccctcggacttgccgaacttcttgccggaagcatcagtgatgatcgggctggtgaacacgttgacgtccacaccgcgcaccttgtggatcaggtccaggccggaggtgaggttgccccactggtcggagccgccgagttccagcgtgcagtggtattcgtcaaacaggtggaggaagtcgttgccctgcagcacctggtagctgaactcggtgaaggagatgccttcctcagagttcaggcggcgggcgaccgtgtccttggcgagcatggtgcccagacggaaattcttgccgacgtcacgcagaaagtcgatgacggtcatcgaggcggtccaatcgtaattggacacgaaacgtacggcgttcgcgccttcggtgtccagaatgccgccgatctggttcttcagacgatcggcccagccggccaccacgtccttcgggttgagcgtgcgttcgccggactggcgcgggtcgccgatgagtccggtggcgccgccgaccagagcaatcggatgatggcccgcaagctgcaggtgacgcatgttgatgagctgcacgaggttgccgatatgcaacgatgcagcggtggggtcgaagccgcaataataggtgatgggctcgccgttcagtgcttctgcgagtcgatcccggtccgtggactgggaaatcaacccgcgccattccagttcctcaagcagggtgttgaaacccgcttccttgaagtcggtgacgtgagccatagcttgtcgcttctccctatcgaattgtgaatgagactgcccaattgggcacagtcaagtttcgcagaacatggcgacagtgccgaacaccagccgagccgcgcgattcagtaaaatgccttattctagcggcgcgggcccataagttcgcgcaaagattcgatgatgtcctgacgatccggcacctggaacttcgggaaggacttgagcatacgcttctgctgtgcgttgatgacgccattgacggcccagcgcagacgctcaaccgtatcctgcgaaaactcacgcatcctgtcggataccgcactggagccccgctgccacgtgccaccggcgcgtgccgccacatcctgcaccacctgagcgacggaatcgagcacctgctcgaatccgagcatgcccgtaaccgtgaccgccaagtcgatgatggtgatcagagccagtaccgtgaccagcgtatgcagcatcggcagcggaatcatatccgtgacccgctcgacatatggctgcgaaccaagtaccacgcccacgccgccgagaccgaaaatcaacgcgcccagcaggcagacgcggccttggaggttgaagcggaaattcgagtaatcccaccagcgggcgtggaacagctgctccatgacccacgaggttgtgtattcgagtatcgtggcgcccaccatcgaaatcaggaagatgatgatcgggttatgtacgttgccgagaatggcgacgccgagtatcgcgccggtgccgtagatcgggcacagcgggccgttgaggaaccctcggttgaccaagcggtgctgttggcaggagacgagaatggactcgtacgtccagccgacgaaactgtagaacagaaaccagaggaaataatgttcgagtgtggtgatcatcgacgggcttcgatctcggcgtagggcttcgcggcgggcaacgcgcgcttgttgaaccggtcgaacgagaaggtctcggcggtggcggagcatttgtccgccaaggtgaccagatagccttcgatatagcgcggcggcaccagggtcatcgggaacatgtggttctcgatgctgttgcgttcgatatcgttgagcttgaagtccttcagggcattgaccagggcggcgtggccatgggtgaagccatgccactggtgttcgccgttatcccagtcgtgccagtcgtacaggaagtaatcgtgcaggagggccgcgcgaatcagggatttgaggtcgacgcggtaccacaggtgcgcgcggtcggccatccacacagccaggcaggcgacacgcacggaatgttcgaacgtggtgacgttgccgtgctggtagcagcagcgttcgatctgcatgtggcgatgctcgatgacctcacggccgtgcttggcgaccaggcgttgaatctgcgttcgggtgagcagatgtcccacggtttcgaccctccgttcgggttggttcagtgcaatcccttgttgtgaattacgattacccgacgatattcaagaatccatcgagtaataccgtgaccgattgtagggcacacgtatgtccgtgcacactcatccaaaagaacgacaacgggaaccgttaatcgtggtgggtttcaagatagtcgagataaccctgaaaaccgccatcgaggcttgctacatcgtaaccgcgatcggcaaggatttcagctacttcctcgctccaccatccttgagcacaatagactacgacagttcgatctgtgggcacggttttgagcacatgggccagagggtcgagtggtgcattgatggcaccttcgaccgggtgggcggcgaagtcggctggttccctcaagtcgagcagcgtgaccgtattcgggtcgagcttggcaaattccgccggcgtgatgcggcggtacgatgcttcactgctctcatcgtcatcgaccgcattacgcaaagcaataggcatgttcttcccctctcgttccgatcttggctcccctcaaggaggggtgccacatagctctaaatcgcgcaggccggctgaatatagttggccggatcaatagcagtaatggtcggctgctcaccgcacaccgggcagtcgggcacatggttcggcaacggcacacggcggatgttcatggtcagggcatccacagtgagcatacgagccacgagcggctcccccacgccggcaatcagcttgacggcctcagtcgcctccagactgccgatcacaccgaccaccgcgcccagcacgccggcttccttgcaggtcggaatctcaccggcggcgggcatgtcgcggaagatgcagcggtagcaggggccttcgccgggaatgacggtcatcacctgaccggcgaatccgaccacgccggcatggatgtacggcttgccggccagcacgcaggcgtcattgatgaggaattttgcggcgaagttgtcggtggcatcgatcaccagatcgtacggttcgatgaggccgacgatgttgctggcatcgacgagctcgtagtaggtgtcgaccgtcacatctgggttgagcgcgcggatggccgtggccgcggattccactttgggcgctccgacacgtgcagtggtatggatgatctgacgttgcagattgctcatatccaccacatcgccgtccaccagtccgatatggccgacgccggccgccgccagatacagggcggccggagagccaagcccgcccgctccaatgatgagcacgctggaggccaacaaccgcttctgccctttgacgcccagccccttcaaaatcagatggcgcgcgtacctctccacctgttcatcagtcaatgccatgttttctccatgtttccagctcccctcagtccgctacgcggccagctcccctcagagaggggagctaataaaagtgtcagtgcaaatatcccgtagtcggactggacggcacggcctgtccctcggtcaccttgcccagaccggacagatacgccgcacgaccagcatcgatggcgtgcttgaacgcctcagccatcagcgggatattgccagcagaggcaacggccgtgtacgccatcaccgcatccgcacccatctccatggcgtcgcatgcctgactcgggcgtccgatgccggcatcgatgatgaccggcacatgcgcattggcgataatgatctcgatgaagtcacgcatgcgcaggcccatgttggagccgatcagcgaaccgagcggcataacggcggcggcaccggcctcctccagctggcgtgcggcaatcgggtccgggaacatgtagggcatgaccacgaagccttccttggccagcatttcggtggctcggatggtttcggcgttgtccggcaggaggtacttggtctcgtgttcgatttcgaccttgacgaagtcggtgtggcacacttcgcgtgccagtcgggcgatacgcacggcttcttcggcgttgcgcgcaccggaggtgttgggcagcaacgtgatgccttcgggaatgtagtcgagcacgctgttctcggtggtctgcgcgcggcgcagtgccatggtgacgatttgcgtgcctgcatgttcgaccgtggccttgatgaggttcaggtcgtagcggccggagcccagaatgaatcgcgactggaactcgtgaccgcccagggtcagcggcttgtcttccactggcagaatcggcgcggcggtgccgaccggattggtgacggcgggctgcggcggcagcggagtcgcctcaacagatgcttcagtaaccggattaatattgctcatagcttttcctttcatccaccctgtacaaactgcacaatttccatgacgcactggtcgtcgagcatggcgtcggcacgcttatcgcgcgggataatctcaccattgagttcgatggccacacgctcggcgcggaatccgtgcgcttcgagataatcggcgacgctgaccggcgtctcgagcgtgacctgctctccgttgacctgcataatatcctttcagatagtaaaaaagggtgcacgaaacgaaccgtaccttaagtggtgcgcccattcatgaacccaatcatgcgaccgttcgaccgctgtgatgtattggctccatcacgaccgtctcacggctgaattatgcaaacggaatgaaagctgtatcggagaacccggcaaatctgcaacaacgattccttacggcggcatgacccgcgtcaagttccccggtcgaagtctggcgacttcctctcagcctcacggctcccgttcgttacgatttctcagtgtatgccgttgcagtgacaacagcaaaatagagctccctctgacgagggagcttcattgggactagaacgtgccgggggctttgtaggcggagccatccgacgtggatgcggggaagagcttgagttcttcgacctcggccttggcgtcggcgatctgctcgcgcacgcgaccgtaagcggtgccgcccttgccgttgcgggagtcgaccgaaccgtggctggagagcacttcgcgtactcccggagccttgtcggccggcaggaacgcggcgaaggtctcgatgaagtcattgtcggtcagatcccacagttcctggccgcggccttcggcgagcttgacgcaggcaccagagagctcgtgcgcatggcggaacggcacaccgttcttgacaagccattcggcgatgtcggtggccagcgcgaagccggtcggggcttcctcttcaagccgctcgctgtcgaagtgcatggtcttgaccatgccggtgaaggcgggcagcagcacttcgagcgtatcgacctggtcgaacacggcctccttgtcctcctgcaggtcgcgagcgtaggcggtgggcaggcccttcagggtggccagcagaccggtcagatcgccgatgagtcggccggacttgccgcgggcgagctcggcgatatccgggttcttcttctgcggcatgatggaggagccggtggaatagccgtcgtcgagcttgacgaaggcgaactcctgggtgttccagatgatgatctcctcggacaggcgggagatgtccacgccggtcatggcggccacgaacgcgaattcggccacgagatcacgtgcggcggtgccgtcgatggagttgtcggtcacgcgggagaagccgagctcacgcgccacggcctccgggtcgaggccgagcgtgttgccggccagtgcgccggagccgtacggagaggcgttgatgcgcttgtcccagtcgatcagtcgctgcacgtcgcgaatcagcggccaagcgtgggccatgagctggtgcgcgagcagcacgggctgggcgtgctgcatgtgggtgcggcccggcatcacggtgcggccggccttttcgctctgctcgatcagggcgttgacgaggtcaagcaggagtccggcaatcgcacgggagtggcggcgcagccacatacgaatcaggcaggcgatctggtcgttgcgggagcgtccggcacgcagtttgccgccgagttcgtcgccggcaatgtcaatcagtccgcgttcgagggcggtggcctcgtcctcatcgtcttcgatgggggcgaaggagccgtcatccacatgacgctggagcgtgtcgagtgcatcctccatgcgctgcagctcgtcggcggtcaaaagtcccgcacggccgagagcacgggcgtgggcgcgggaaccggcgatatcgtcgtcggccaagcgccagtcgaactgcgtggacttggacagtcgggccagttccggcgacggaccggacgtaaagcgaccaccccacagggccagatgttcgttgttctcagtcatgaaggctccttgaaaagtgaaaatagctgtgtttaagcgtagcaatgtgttcaaacatacagttgcccccgctggcgagggctgtcacatggagtgtgactgaggacagtcctttcaaagaccactcccagtcagctatgccgacagcctcgcagcgggggcgactgagtaagaatcactcgacggtgttcttcgggacctcgatgccgttgccgaacttgacgtcgcgggctgcggccacgcgggacggcaggccatagatgtcgatgaagccgttggaggacctctggtcgaaggtatcgccggaatcgtaggtggcgagcttgtagtcgtacagcgaggagtcggaacgacggccggtcaccacggcgcggccaccgtgcaggaccatgcgaatctcaccggacacgtacttctgggtgtcttcgatgaaggcgttgagcgactgggttgccggggagaaccactgcgcatcgtaaaccagctcgccccagcgcttgtcgatgtcgcgcttgatgcggtgctgttcgcgttcgaggcagcagttttcgagttcctggtgagcggtgatcagagccacggcacccggagcctcgtacagctcgcgggacttgatgccgaccaggcggtcctcgatgaggtcgatgcggccgatgccctgggctccggcgcggcggttcatctcttcgatggcctgcagcggggtgacgtcacgtccgtcgatcttgaccggcacaccttccttgaactcgatgacgacttcatcttcgaccggcgggaaggccgggtcgtcggtgtaggagtagcagtccttggtcgggccgttccacggatcctcgaggaagccggtctcaatggcgcggccccatacgttctggtcgatggagtacggggacttctcggtctgggtgatcggcagcttgtgctccttggcgaacgcgatctcgacatcgcgggtcagggacaggtcacgaatcgggctgatggccttcagcgtcgggtcgatggaggcgatggagacctcgaaacgaacctggtcgttgcccttgccggtgcaaccgtgggagatggtgtcggcgccgaactggtgggcggcgcgcacgaggtgcttggagatcagcggacgggagatggcggagaccagcgggtagacgccttcgtacatggcgttggccttgagggccttcatgcaatattcgttggcgaactcgtcacgggcgtcgaccacgtaggattcgacggctccgcaggcaagggcgcgctgcttgatggtctcgaggctttcgccgccctggccgacgtcgagggacacggccacgacgtccttgccggtgcgctccttcaggtacgagatggcgacggaggtgtcaagaccgccggagtaggccagaacaatgcgcttgttatctgccattggttccctttcgttcaaggtctgaaaaacaaactgatgcaagtatatacagaggactgtatatttatgcacggcgtgttggttatttggaggcgaggcttagtagccagtcggagcgggagacggcggtgtcgtcattggtgcaaatcaccatgacggtgtcgtctccggcgatggtgcccagcacgccttcgatcggctgcctgtcaatcaccgaggccacgtattgtgcggcaccggaaggcgtgtgcaccacaaccagatttccggcggcggccaccgaggtgaccagtccgttcagcacgcgggacatctgtgcctcaccgcgctcccctacatcctcaccttctgaagcaacgacgctgcgacccaccgtgtaggccaccgtgccgtccttcagccgggtcttcaccgcatgcatctcgtcaagatcgcggctcagggtcgcctgagtcaccgcaatgccctcgtcgataaggattttggacagctgtgattgcgaggtgatgatatgcgtggcgagcgcctgttctatggcactcagccgcgccgccctggtggcagggcgctgcagggacggaccggtttcactcatgcgagcaggctttcgtctccacgggccttgccggtcaaccaagtcagcaacgctttctgtgcgtgcagacggttctcggcctcgtcccacaccacggactgcgggccatcgatcacttcagcggtgacttccttgccgcggtaggcgggcaggcagtgctggaagagcgcatccggcttggccaatgccataagttcggtgttgacctggtaatcccagaacggcttggaacggatggcgtattcggcctcctcgcccatggagacccaggtgtcggtgaacacgcagtcggcgtccttcaccgcttccttggcatcggtggtgaccaggatggagccgccggtctcggccgcgacgcgcttggcgtcggccacgatgtccgggcggggcaggtagccgtgggggccggccacgcgcacgtccatgccggccacggcaccgccgagcaggtaggagttagccatgttgttggccgcgtcaccgaggtaggcgatggtctggttcttcaggttgtcgacgccgcctcggtgctcggcgatggtctggaagtcggcaagaatctggcagggatggaagtcatcggtcagggcgttgaccaccggatgggtggagtacttggccatttcttcgacgcggtcctggccgaaggtgcgccacaccacgccgtaagccatgcggtcgagcacacgagcggtatcggccacgggctcgccacggcccagctgggagccggacttgtcgatgaccagcgggtagccgccaagctcggcaacgccgatggagaagctggaacgggtgcgggtggatggcttgtcgaacagtacggcgacggcctgcggaccggcgaacggctgcttgtagaagcggtcatggtggaacttgatggcaagttcgagcacctgcttctgctcctcatggttgaggtcgtcgtcacgcagcatgtggcgaagttctggggtcatgatgatctccttggatcggtgggtcggcagtgacggcgagaaatcagtcgtcgggcaggtccgtaggcacatccttgaggatggcaagtgcctgatccacgtcttgagcggttacaatcagcggcggtgcgaaacgcagcgcattgggagccaccgcgttgacgatgagcccgtgttcgaggcagtagttcatcaccgcgtgggagcagggatgcttgagctcgacggcgtccagcaaaccacggccgcgtacggaaacgaacagcggattaccggtggccataatgccatcgcgcagctgttcgccgcgagcttcggcgttggccaccagattctcgtcttcaatcacgccaagagtggcgagtcccgcagccgcacccagcggattgccggcaaaggtggagccgtgggaaccaggagtgaacagagccgcaagtttctcgccgaaagcgatcatgccgcccatcgggaatccgcctgccacgcccttggcgaaagtcaccatatccggcgtcacgccgccggacagatcgtcacgctggaatgcgaaccacttgccggtacgtccgataccggtctgtacttcatcgatgatgagcagcgcgtggttgatatcgcacagttcgcgcacgaacttgacgtaatcggcgcccaacggctgcacgccggcttcgccctggataagttccagaatcacagcagccaccggacccttgccatagcggccgagaccggtctgtgcaaaagcgtcgtgcagggcgaccttgtcgccggcgcgtacgaattcgatgttcggcaccagcggatcatacggcttgcggataccgggtttccatgtggcggacagcgcacccatcgtacggccatggaagccgtgagtcattgcgagaatgcgtgcgggcttgccgccgatggaaggcagggcaccaggcaaggtgcggccatacagcttggcgagcttgagggcagcttcattgccttcagcaccggagttgccgaagtagactttggagccttcaggtgcaccagccagcttgaccagtttggatgccagctcaatttgcggctcggacgcgaaatagttgctgatatgagccaccttggcagcctgatcggcaaccgctttgacccacttggggtgggcgtatccgagggaattgacggcgatgcctgccaggaaatcgaggtattcgttaccgtcaacatcccagatgtgggcaccttggccgtgatccatgacgcgcaacggcgtaccgaacacattcatgtggacctgagagtactctcccagccacttgctgtcctccgtacctagtttttcctcatgctcagtagccataagagctcctcatttccagtccttcatcgggcataaccatggtaccgatgcctgcggaggtgaatatctcattcaaaatcgaatgcggcttgcgcccgtcgatgatatgggcttggggcacgccaccgtcgatggccctgacacaggcctccatcttgggtcgcataccggattccaggtccggcagcatatcgcgcaggttttccacaccgatccggccaatcagagaattcttgtccggccaatcggcgtacagaccatccacatcggtcaagataacaagcttgcgtgcgcccacagcggcagccaaagcggcggcggcggaatcggcgttcacgttgagcacttcagtggcatcttcttcgttcggagccacggaagagacgaccgggatacgaccggcggccaccagatcctcgactgccgaggcatcgacggaaaccacatcgccgaccaagccgatatcggtgggcttgccattgatgatgggcctgcgctgcatggccgagaacaggccgccgtcttcaccggacaggcctacggccagcgggccgtgcgcgttgatcaggccgaccagttcgcgtgacaccttgccggtcaggaccatgcgcaccacgtccatggcctcgggggtggtgaccctcaggccgcctttgaattcggatttgatgccgagggccttgagcatgtgggagatctgcgggccgccgccgtgcacgacgatcggatgcaggcccacctgacgcaggaagaccatgtcttcggcgaagcactgcttcagatggtcatcgaccatggcgttgccgccgtatttgacgacgatacgctggccggcgaactcctccagccaaggcagcgcttcaataagcacttctgccttctgatcggcgcgcaaatcggtgtgcacgtcgaaatggaacccaggtcccttcaattctgtagccaatttttctcttttctgcgacgccggcgacgctatcgccgccggctgctacaaacagcccactgggctgtttgcgttatatgcgacgccggcgacgctatcgctgccggctgctacaaacagcccactgggctgtttgtcagctttcgtagtcagcgttgatgtggacgtattcgtgggtgaggtcgtcggtccagacggtggcctcggcgtccgagccggtgttcaggtcgatgtcgatgtggacttcgcgcggggtcatgtcgacctcgctgcggtcgcggccggcgccgccgttctcgcagatgcgcacgccgttgacgtccacggtcaccttgttcgaatcgtaaggcgcgacttcaggcggcacagtgcccaaggagctgacgatgcggccccagttcggatcgttgccggagatggcgcacttgagcaggttcgaggcggcgacggcacgaccacaggcaagtgccgcgtcctcgctggtggcaccggtgacggtgatacggatgtcgtgggaggcaccttcgccgtcgccgatgatctggcgggacagggagacgcaggcctcacgcaccagcttgttgaattcgtccttgtccggttcgacgccggaggcaccggaggcgagcagcaggaccgtgtcgttggtggacatgcagccgtccacgtcgatgcggttgaacgaatgttcggcggccacggcgagtgcggcctgcatctggccggcggagacgaccgcatcggtggtgatgacgcacagcatggtggccagctgcggggcaatcatgcccgagcccttgaccatgccgccgatcttccagccgttggagccggtcagttcgaccgttttcggcttggtgtcggtggtcatgatggcgtgggaggcggcggcgccggcttcggcggtgacggcaagagcctcatgggcactcttggcaccagccaacacgttgtccaacggcagcagttcaccgatgagaccggtggagcagacagccacatcattcggttcggcaccgatgagcccggcgaccgtttccgcggtggcgacggactgggcgtaaccggcctcgccggtgcaggcgttggcaccgccggagttcagaatcacggccttgacgtgaccgtcggcgacgactttacggctccactgcaccggggcggcgcagaaacggttcgaggtgaacacgcctgcagccgcgtcgagcgggccgttgttgaccacgagggccaagtccttcttgccttcgacggatgaaataccagccgccacgccggcggcggagaaaccttgtgcaaatgtaacgctcacggtgctactccgatcttggtcaggcccgcgtcttccggcaggccgagtgcgatgttcagtgattggaccgcttgtccggcggtgccacggttgaggttgtctatggcggcaaaagcgtagatgcggccggccttgcggtcggcgacgacctgcaggtgggctgcgttggatccgatgatgttgccggtggcgggcagtgtgccctcgggcagcagcaccatgaagtcctggccttcataggccttggaccatacggcgcgaatctcctcatcgctcagtgccttggccttgtccgtcatgcgggcggacacggtggcgaggatgccccgggacatgggggcgagaatcggcgtgaaaccgagcgtgaattcgctggcttcggccgcgctcttgccggccgcgtgggcgaagttctgcaggatctcgggaatgtggcggtgcttgccgcccaccgaatacggcagggcggattgcagggcctcggcggcaagcaggttggtgcgcttgagattcttgccggcacccgagtatccgacgaccagatcggccacgatatcctgcgattcgaccagtccttcggcgatgccgggctggagggccagcgtggtggcggtgacgttgcagccagggcctgcgatgcgcttggtgccaggaagcgccgcgcgctggcgggtgtatgagccgtccgcggctttgccggtgatgagctcgggcatgccgtaggtccaatgctcatagaaatcgccgccgtagaactcatcccaagcggcctgttcttcgagacgatggtcggcgcccaaatccacaaccacggcattcggatcgagctgcgaggcgagcttgcccgaagcaccgtgcggcagtgcgaggatgataacgtcatgcccgttcagcacttcgggcgtggtatcttcgacgaccagattggccagttggggaatatgcggcatgtgcttggccatcgactcccccactgaggaatggcctgccacgcaggtgatgtcgaagtcggggtgcgcggccagaatgcgcagcgcttcaccgccggcatagcccgtggcaccggccacggccactgtatatttcgccatactcatctcttttcactgatgtgtcttgggatgagtatacgcgattatgcagactattgcatatttatgcagtgggtgtgttggtatgtgaacgctacttatgcggagatggagtcggaggaggagccggtgccgccggtgagttgctggagggcttcctggtagaggctcatggcgtcatagccattgaaggccatccagatgacggcgatggtgtacagcacgttgatcaccacggcggccacagccaaaccgaagcccttcatatggaaggtgcgcgtgcgccacattgccaccgcgcccatcagtgccgagagcactggcaccgggaagaacagggcgaggataaaggagatgatcgcatacgaatcccagtgcccgtagagtgggttctggtttggatcgttcaggtcgatgccgtggtaataatgcggctggtgaggctgaccgttcggctgttgaccatacgactgcccctgcatgcccgggtacccgcccggatatgcgcccggaccggactgttggccgccttgagcatacggccagccgcccgcctgctgattgccgggccacgccggctgctgaccgtacggctggccggcctgctgggattgcgccgcgccaccgttgatgccagcggctgcggcggaatccttcttggtatccggctcgggagcgccataaatatacgggttgtaattcggcccgtattggtcagacatagcaccatattcaggctgctggtactgcccgtatttcggcttgtcctgctccggttggctcatgacgctcctcgattcggatgatcggttgggtcaggcgcgcagctgggcgccgatttcggcggcctcagccacgatggccttgcggatggcgtcgctgtcttcggcggacagcgtcttgctcggtgaacggaacaccaccgcataggccagggacttcttgccctcgcccacctgttcgccggtgaacacgtcgaacagttcgatggattcgaggttcgcgccggcggccttgcgaatcacgttctcaagctggcctgcggtcacggtctcgtccacggtgaaggccaaatcctgcttgaccggcgggaacgtggagatcggcttggcctggacgggcttgccggtcagcgtggcgaacagcgcggtgaggttcagctcgaaggccgcggaatgggccgggaagccgagcgcctcgttgacgcgcgggtgcagttcaccaacccagccggtgaagacgtcgcccaccatgacgcgggcgacgcggccggggtgccattggacgggcacatcgtcggcggcgggctggtcgagttcgattgcggcaccgatacggccggcgatgcggcgcacggcctcgacggcgtcggaccagtcgaccgggcgcttgccgcccatccagccatcgtcctcggccagaccggtcaggatgccggccacatggtcgggctgttcgggcagaccggcgtcaagcgcggcgagctgttcgtcggtggggcgcacgccgccgggcagtgccgggatggcgggcgcgttcggatcccacaggtagacgtggccgagctcatacagggacacgttttcgatgccgcggcggatgttgcgctgcacggtggtggccagggtcggcagaatctcgcgacgcaggtacggacggtcgccgtagagcgggttggcgatctcgacgctgaccttcttggtggcttccgggtcgaagccgaaggccttgtaatcgtcgtcgcccacgaacgggtagctcagcgattcgaccatgccgaactcggcgagctcgtccgccactcgacggcgacgctgctggtccggggtcaggcccaccagaccctcgaccggtgccggcggcacggtgatcggaatctggtcgtagccgaccagtcgggcgatttcctcgaccaggtcgcacggctcgttcaagtccggacgccagctcggcgcggttacggcgaactcgccgttgccgccgccggccaccgtgcagccaatgtcggtcaggatgtcggagatgcggttgatgtccacgtcgaggccggccacgcgggccacttcggaggccttgaagtggatgaccttggcgcgcggcgtgttgttcacgtcgttcgggtgttcgctgggctcgccgttgccgtacttggccatgagctcggcggccatctgggtggcggcgggctgcagcgcggtgtcgacgccacgttcgaagcggcgggaggcctcggatggaatcttgtggcgacgggccgaacgggcgatggtcacctgatcgaagtgcgctgcctccagaagaatgttcttggtgtcagcggtcacttcgccatacaggccgcccatcacaccggcaaggccgaggatgcgcgagccgcgttcgccgttcggcgaatcggtgataagcagatcttcgacgctcaggtcatgttccttgccgtccagggtggtgagtttctcaccctcgttggcgcggcgcacgacaatcgggccttcgagcttgtcgaggtcgtaggcgtgcatcggctggccgaggtcaagcatcacgtagttggtcacgtccacggccaaggagatggagcgcatgccggcgcgaatcaggcggcggcgcatccagttgggcgtgtgggcgttgggattgaagtccttgacgatacgcgcgtagtagcggtcgcaaccgggcacgccgtgaatcggattgttatcgtcgatttcaacatcgatgtccaccggggtgccgggctggtagtcagcaggttccggggccttctcgttcagtgccacggccggatcggtgtaggcggcaccggtggagtggtggtattcgcgggccacgccacggtaggacagcgtgtagccacggtccggggtgatgttgatctcaagcagaggctggtcgaggtgcagcaggtgcatggcgtcctgaccaggcttcagagcctcatattcagcctcggagaagccgtactgacgcagcagaatgatgccattgtggttgtcgcccagacccagctcacgttcggaggcacacatgccgttggagatgtggccgtaggtcttgcgcggctcgatcttgaagtcgccgggcagcacggcaccgggcagggtgacgacgaccttttcgccggccttcatgttgggtgcgccgcagatgatgccgcgcggcaccttgttgccgtcttcgtcggtctcgttccattcgtcgccgcagtccacgtggcaccagttgatggtcttgccgttcttctgcggttcgggggtggcgtcgaccacgtagccgaccacaatcgggccggtcacctgggaggagtggatctcctcttcctcaagacccaccttgacaaggtccttggcgagctgttcgtaggtcaggccttcgggaacctcgacatggtccttgagccaatcgatatcgatcataggcatggctgaatcactcccccatcacaaactgttcggcgaaacgcacgtcaccttcgaccaggtcgtgcatgtcgttgatgtcgctgcgcagcaggagcgtgcgctccatgccgacgccgaaggcgaaaccggtgtagacgtccgggtcgatgccggcggacttcagcacgttcgggttcaccatgccgcagccgccccactcgagccagccggggccgcccttcttgtcggggaaccacaggtcgagctcggcgctcggctcggtgaacgggaagtagctcgggcgcaggcgcgtcttggcttcagggccgaacatggcgacggcgagcttgtccagcacgcccttcaggtcggccatggtcaggtgcttgtcgacggcgagggcttcgcactggtggaacaccggagtatgggtggcgtccagctcatcggtgcggaacacacggccgggggacgcgatgtacagcggcacgccacgggtcaggagggcacggacctgatcggaggaggtctgcgtacgcaccaccatgttggagccgacgaaaccggcggcgtccttggcttgattgcccttgacgtagaaggtgtcctgcatctggcgggccggatggtccgggccgaagttcagggagtcgaagttgtaccattcggcttcgatttccggaccggaggagatctgccagcccatggagatgaagaagtcctcgacgtcttccatcagcttgggcagcgggtgacgggcgcccagaggcttgcggttcaccggcagcgtcatgtccacggtttcagcggcgagtgcggccttctcggcggcttccttgagctcgacctccttggggccataggcacggccgaagtcggcgcgcagcttgcccatgagcttgccggcttccttcttctggtcgacgggcagggagccaatggccttgctggccttggtcatcgccgaatcggcacctgcgtacgttgtcttgatggccttgagctcctccaggttggaggcgttctggattttctcgatgcccttggcaacctcagcggtcacctggtcggcgtcgaacaccatttgttctgccacgagaaccctttcgtctgatgttttctcagcgtttcacagcgtttttaccggtttcacattctttcaacatgacccgacatagacagcgacatcaacatcaccgcggccgaggtgccgaggttcagcgattcggccttgccgtacagcgggatggagacgatgcggccgcagcgtgtgaggatgtccggttccaagccacgcgcctcattgccgaacagcacggctttcggagcctcgaccgccgccttgtccgccagtactgcgggcaggctttccggcttgcattcttcggtgccgtatacgtcggcggcccagacgcccatattatggtcgcctgtccaggtgaagaattcgtcggtgctcatggcgagtaccggcagatggaacagggagcctgcggtggagcggatgaccttggggttcagcacgtccacgcagtcgtccacgaagattacggcgtcgcaaccggccgcatcggccgcacggatcacggtgccggcgttgcccgggtcgcgcacctgccagaaggcggcgatctgcgggccccggccgttcttgccaagttcgacgtcatcggcaccggcgtgcatggactcggcattgccgacggccacgatgccctgggcgtccggactgatgcggtgcatcacgtcgccggtgcagtagtgcacataaatcgtggcatcctgcgaggtttcgacgatcttctccaacgtggaggagatgatacgcggatgttccaacgcctgcgaaacctccacatagaggtcctgcaccacgtccggccgccaagtgacggcctcgcgcacggattgcgggccttcgataagaaaacggcccgaacgttcgcggcctttggcgcgggtcagatcggcgatgcggcgaacgcggtcggatttcggattatcaagaatctgggcgttgatgggcatagccactaccctactgccgggtcattacgtcagtcgtggctcgctcccgctggcggaggcatcgtaagcctttcagacaccttgaaaggcactgtgccagtctgtcgcctttcagacaccttgaaaggcgaagtgccaattcccggtgccgatggctacgcctatggaggccagcgggacagccagacagatgacgtagaagatccagtcgataggcttcagacgcgagatacgggcttgggagcgtggggcgctggagccgaagccgcgcgcttccatggcggtggcaagtttggtggcgcgccggatggagagcaccagcagtccgaacgcttgggagagggcacgggcgatggcgttaccgtcgccaaggccgcgcgaacgctgggacaagccaagtgcgcgccaatcttcctgcagcagcgcaaacatgcgcaatccagccaacccgccgtatacgaatcgcggtgagaagtgcagaatctcaaccaaaccgtccgccaaatcagtgggatcgaggcccagggccaggatcacgccgggtacggcaatggccgccaccctgatagccgtggcgatggccagattaatggatccctcactgatcacaatccagccgccctgccacaggatctcgcccgaggtacggccgtagagaaacacggagataaaactgccggcggcggcgatccataccggccaggtcttacggcatacggtccacggagccacgccaccaatccacagcagcacgaattcgatgccgagcgccgtggacgcggataccacatccagactgatgaacatcggaatacacagcaacagcgcaccgatgatgcggctgaccgcgttgatgcgcgcgatgaaccatgagggcgatgaggctttgaccggctccacgcgcgtttcctgcggactgacgattaccacgtcactcatgccttcgcctcctcgaacatcacacgtcgtgcgcccagcgcatccaccagcgcctcatcgtgcgtcaccatgatcacgcacgagccttgatcgcggatggcggcgatcagcttgaccatctcattccacgtactgaaatcctgtccgaatgtcggctcatccatcaccaacactttgggtgcggcggccagcatggaggccacggacagtcgccgcttctccccgccagacaaggtatacgggttggctttggcgaagcgcgtgagattcatctgctcaagcatgcggtcggcggtccgataagcctcgtcttggctctgccccatcgacttggggccgatggcgacttcgtcacgcacgaaattggcagcgaactggtgttcgggctcctggaacaccatgccgatacggcccagcagttccttgcttttccagtcgatcggctcacgcccggcatgcgcgggcttgaggttgtcggcgatgagcaccttgccggcgataggctcgagcagcccggccaaggtcagggccaaggtcgatttgcccgcgccgttcggacccatcagagccgttacttcgccgggatagaaatccagattgatgccaacgccaagagcggttccacggccaaagcttaagttctcagtgctgagcaccggcgcatcgtgcgcaggctcctgcttcggtgagtaatcgggaatcgcacggcccggcacccacgcgccaccggcggccaatacgtcgcccatctcggcgaacacctcgtccggcttgccgtcggcaatgaccgcgcccgtgggcgaacttgcatcgggtcggccgagcacgatcacgcgatcgaccagatcgagccatacatcgatatgatgttcgaccacaaccatggtctgcccggtggcctcgatgacctttttgaccgcgtcatgcacttcgaccacgccttcggggtcgaggttggcggtcggttcgtccaacaacagcagaccgggcttcatagccagcacgccggccaacgcgagacgttggcgctgaccgccggacagatggcgggtggaccgatccagttcgagtccgccgagtcccaccatatccaatgattcgcgcactcgctgccgaatctcctcgcgcggcacgttgaggttctcgcagccgaaggccgcgtcatcgcccagtcgttcaagaatgatctgcgagtccgggtcctgaagcaccagtcccacgcggcctcgcgcctcgcgcgcatcgacaccatcgatggtgagcgagccctcctgctcgccttcctcatcgccgccaagtacgcctgcgagaccggccatcatcgtgcttttgcccgcccccgaagcaccgagcagcaacacacgttcacctggccggatggtgaaatcgacggcacgcaacgcgaagtccttacgcgtggcgtgccgccatccccagccgctggcctctaccgcagccggattaacctgcatcagacgcgcgccttgctgcggccggattcaaagcgttccagagcgccggtggcggcgagcgcacgagacaagtaccagaccaccacgccggcgatcacgacgccggagatgatggagcaaaccagataccaagtgacgcgcaggccgttccagcccgggttggtggcccagtagtaggcccagcagcccacgccggcgagcgcaccggacaggatggtggtgccgatgttccacttcttccaagcgaagacggcgaaggcgatttcggcacccagaccctggatgatgccgacgatcagcgagccgccgacaccccactggttgcccagcgtaagctcgaggaaggcggcgagggtttcggcaaacagtgcggcaccgggcttgcgcacgatgattgcggcgagcgggccggcgaacagccagaatccgttgagcagaccctcgaaaccgggggtcacgccctcgaacagggccagcggggcggagcagacaatgtcccagccccagaaaatgacgccggatgcgacggcgatgattgcggcgacgacgatatcgacgacgcgccacttgtaattggctttggccacagcttcagtcatgaatgtgcctttcttctgctcgtacgcaggccgaacatacatggatatatgtacgcacatgatgcacatgttcgtggccacgcgcgggttggttcaggcacgggtgggtaagagcgacatttccgtgcgccggcattatccggtcacgttccatcggtcgagactatgaatctcctctcagccgcctaacggcagctcccgtgtcaactccccgactataaagcaagccgccgtcaaaggcaatagccacatccgtgacctacctgacggcagctcgccaccattaccgatgcggttcggttacttgccgagcttgtccagcagcaaagcctcggtgatcacgttgttcttgaggccgggcagggagatggactcattggggctgtgggcgttggccttcgggtcttcggggccggtgaccagcacctgagcgttggggaaaatgcgctgcagttcggggatgaacggaatggagccgccctcgcccttgttgatgggctcaacgccgaaggcctcggtcatggcttccagcgcgtctttggtggccacggcggtcgggtccatggcccagcccatgccgttttcgccgcgttcgacagtgaccttggcaccgaacggcgcgtgggattcgaggaatgcagccagtgcttcctgcgcttcttcagggcgctgggtgggcgcggtgcgcagcgacagacggaagcgggtctccggggcgatcacgttgaaggatccctcgaccgggtgggcgtcgaagccgatcacggtcacggacggcttggtccacaggcgtgaggccagcgaaccggtgccggcgaactcgtaaccggccaccacgccggaatcctcgcgcacggtggtttcgtcaaggtcgcgttgcaaaccgccgattggctcttccgcggccacgccgggcacggccagatcgccgttctcgtcgtacatggaagcgatgagcatggcggccaacgtgttggagtcaagaatcgggccgccgtactgaccggagtgcaccgggtgctcaaggccctgcacggtcacgtccacgcaagtgttgccgcgcagcgaggtggtcaaagaaggaatgtccgccgaccagttgccggaatcggccacgataatcacgtcggcggcgaattcgtcgcggtgagcctcgatgaagggaatgaagcttggcgagcccatctcctcttcgccttcgatgaacactttgatattgacgttgaggtcgtcgcccaaagccttcagcgcaccggagtggatggcgatgccgccgccgtcatcggcggagccacggccgtaaaggcggccgtcgatttcggtggccacgaacgggtcggtgttccactcggccgggtccggaacaggctgcacatcgtgatgggcgtagagcagcacggtgggggcgtccggagaaacgatatgcgagccgatgacctcccatgcgcccggagtgccgtcggcattggaagcctggaccaccttggcatccacacccacgaggcgcagttcgtctgccacgaattcagcggagcgcttcatatgttcggcggtgatgcccttggcggagatcgactgcagcgcaaccttttcggccagcaccttgacgatgcggttccaatcggtttcgacgcgcgaacgaatctcgtcagcggtgagcgttgccatgatggtcctcctttatatgtgtgtaagcggcgtcattgcaatggctgcgccagtatacaagtgtctgaacgtcaccgtaacctcaaagcatgacatggaatccgtttaggaaaaaagaagaggctcaagttcccgttgagcaggccccgaagaagaccgccgatccttctgagaaaaaaggccgtcctaccccgaagatgaagcaggctcaggccgccggtatccgtccgctggttccggtggaccgcaaggccagcgccaaggccgccaaagcccgtctgcgtgagaaggagaacgccgagtacgaggcgatgcagaagggcgatatcaaccacatgcccaaggcggaacgcctgccttggcgtatctacatccgtgattatgtggatgcccgtttcaaccttggcgaatggttcatcccggtggccttcgcgattctgatcgtctccatgttcgtcacttctttgatgcagaaccagtgggcttccatcatcatgatggcgcttatgtacggttacctgattgccgtgatcatcgacgtatggctgatgtggcgcaagctcaaggccaagctcatcgccaagtacggcgaacagtccgtgtccaagggctctcgctccttctcctacgcttggagccgttcgattcagatgcgtcgttggaggcttcccaagccgcgttacccgaagcgcggtcactggccggcagactgatgtccatatatactctggctcccctcgttgaggggctgagccgtaaagaaaacagtccagtggactgtttttaggcgaagtggcggcgatagccgcatatggctccctagcatgggagccatacttatatgcaccaaggaggcaatcatgagcgaacagtttgatctggtcatcatcggggccggccccggcggctattccacagccctgcgcgccgccgaactcggcatgaaagtggcactcgtcgagcgtgacgccaccgtgggcggcacctgtctcaaccgtggctgcatcccctccaaggcgctcatcaccgccacccacaccatcgacaccgtgcaccgtgcggccgaactcggcgtcaacgcctcggtgaatggcatcgacttcggcacgctgcgcgactatcgcctgcgcgtggtcaagacgatggtgggaggactggccggactgctggtccatcgcggcatcaccgtgttccgagccaatgccgcgttccatgcggatgagatcgctccagcaacttccaaccacatcgtccacctcgttccctcccccgaccaaagcgacatcctcacctatcacaaggccgatgtccccgaacccagcggccccacgatggacctcacggccacgaacatcgtcatcgccaccggtgccaagccacacccattgcccggtaacccgttcgccggcgccctcatcgactccacacaggcgctggaagtcaacgaatttccctcttcggcggtgattatcggcgccggggccatcgcccttgaattcgcctcgatgtggaacgccgccggttcgaaggtgaccctgctgattcgcaaggaccgcgtgctctcagcctgggaccggagagccggcaccacgctgacccgtgagctcaaacgtcatggcgtgaacatcatcacccgcgccagcgtcacccatgtggacaccggcgcgaaccttggtgccaccgtgcactacacgcgcgaaggccaggacggcgaacagagcgtttggggcgaaatcgcccttgtcgccatcgggcgtgacccgatcaccgacccagcatggggcgtgacgattgatgaccacggacatgtcgccacggatgcgtacggtcgcaccgacaaaccgggcgtatgggcggtgggcgacgtgacggccggtcacgcactggcgcatcgtgcttttgagcaaggcatcgtcatcgcggagaccatcgccggactcaatcccaagccggtggacgaagccgctgtgccgcagatcgtgttctccttccccgaagcggcgtcggtcgggctcaccgtcgaacaggcgcaggcgagagaggacctcgtcgaaatcaaggagaccaactatccgatgctggcgaacgcgcgcatgctgatgagcggcacggccggctcattgaccatcgtctccggctgcgacgcggccaacccggacaccccgcgcgtgctcggcgtgcacatggtctccccgatggcctccgacatcatcgccgaagccgaacagctggtcggcaaccatgtgccgctcgccgacgcagcccgcctcgttcacccgcatcccacattcagtgaaacgctcggcgaggcgctgctcaaggccgacggacgaccgttgcacacacgctgagaccaaccagcacaagcaagttcggaccagcgcacctgataagatattgcccagtgtgtttcgtcccaacaaaggaagaagtgatggcggaaaaggacgcgaagccgaagaagcagagcacaatcaagcagattatccagatctacaagtacacggctaaggaagacaaggccctgccgtggcttgaggccggtgctttcctgctgcctgtagtcgtgatgatcatcatcggtctgattgtcaagtggacctggctgacctggatcttcaccatgattaccgccatcatgctcggcattctgctggccaccatgatgctcacccgccgcgcggatgcagtcggctacaagcagattgatggcaagccgggtgccgccatcggcgtgctgagcaacatgcagaaagccggctttgacttcccgcaggaaccggtgtggatcgacccgaagaccaaggatgccatctggcgcggcacttcgatgaacggcatctacctgatcggcgaaggcgaatacggtcgcgtcatgaaggcgatggatcgtcaggaacgcgatatcaagggcgtcaccgccggctcctccattccgatataccgcatcaccgtgggccacggccccaagcaggtgccgctgaccaagctgcgtagcacggtgatcaagtccaagagctatgagcccacggaccacaagaacgcactgatcgccaagattcatccgcgccgtcgcttcctgctgaccaaggccgagatggaaacgctgaacgatcgtctgcgcacgctgcaggccaagaagggctatgccatccccaagggcatggatccgaaccgcccgcagaagatctcccgccgcgcgatgcgcggtcgctgatcggcagcacacaaccaaatcgcacagaagccccggaatccgttcaatcggttccggggcttcgtcatatgtctcataatcgcgtccacttacatccacctacgtcacctgtcaatacccactgtccacgttgcggacatctctacctactcccccgatagtctccgtttccattctgtaatgatgtttcgttgaaataacgcgcctgcgcgattgtcggccacagtcacgaaacattctcgtaacccaagtttcgagccggcgaaacgcgctattttacgatatataccgttatatctcatacgaaaggagcggtcccgtgaccgaactcaagtccaaggaagacgtcgaggcccttatcaacaaggaaggcatcgagtatgtctccgtccgtttcaccgatcttatcggcgttcagcagcacttcaccgtgccggctagcgaattcctgaaggacgctttcaccgacggcatgccgttcgatggttcctccgttcagggcttccaggccatcaacgagtccgacatgaagctggtcccggacgttgagacctctttcgttgacccgttccgcaagcacaagacccttgacgtggccttctccatcgtcgacccgctgaccgacgagccgtactcccgcgacccgcgtcaagtcgccggcaaggccgaggcctacctgaagtccaccggcatcgccgacaccgcatccttcgctcctgaggccgagttcttcatcttcgacaaggtgcgtttcgagaactccatgcagcgctccttctacgaggtcgactccatcgaagctccgtggaactccggcgttgactccgaagaggacggcaccccgaacatcggtttcaagaaccgcgtcaagaagggttacttcccggttccgccgattgaccacacccaggatctgcgcgacgatatggtcgccaacctgcagaaggtcggtctgatcctcgagcgttcccaccacgaggtcgccggcgctggccagcaggagatcaactaccgcttcaacaccctgcagcacgcaggcgatgacctgatgaagtacaagtacgtcgtccacgagaccgccgctctggccggcaaggctgcgaccttcatgccgaagccgatcgccgacgacaacggcactggtatgcactgccaccagtccctgtggaaggacggcaagccgctgttctacgacgagaagggctacgctggtctgtccgatctggctcgctggtacatcggcggtctgatcaagcactcctcctccgtgctggccttcaccaacccgtccctgaactcctaccaccgtctggtcccgggcttcgaggctccggtcaacctggtgtactccgctcgtaaccgttctgccgccatccgtattccgctggccggcacctccccggctgccaagcgcatcgagttccgcgctccggatccgtcctgcaacccgttcctggccttctccgctcagctgatggctggcctggacggcatcctgaaccacatcgagcctccggagccggtcgacaaggacctctacgagctgccgccggaagagcacgctggcatcaagcaggtgccaagctccttggccgaggctatggacgccctggaagaggaccacgacttcctcaccgccggcgacgtgttcaccgacgacctgatcgagacctggattggcctcaagcgcgacgagatcgaccaggctcgcctggccccgaccccgctcgagtacgagctctacttccacatctgagtttgagagcttagcaacgttgggatttcgccattgctcttctcttgtgggagtctaatgggagtcattcagcgtaactagaaagaacctcgtgaaattcgtttcacgaggttcttttttgtatgttgcgttgtgtgttatgcgatgtgtgttgctcctggaatattccaggggcgggccgctacttagtctcccaacgctccttgagtacataggcggcggctttgggctgacggtcgcgagtgaagacgtccttcttgttgccgtcgacgcgcatgataccttcaccggtttggaagtcgcagaggttccatacctgctcgcccaccactgcctcgaacatgtcgaacacttcgtgctgcatggtgaggtactcacactggtattcctcactccactgcacgcttggcagcttgtgcgcaccggcatcggtgtccgcaccgtattcggtgaacaggaatggcttgttgggttcggtgttcatccattggttcatctcgttgatgaaggccttcttggctccgatgagctgatacccatcttgcacatatcagccgtaataccggttcaggcagatgacatccgcgaactgatggcacttgtctttgcctccggcggccatcagcagattggtgtaggtcagcgggcgatgctgcggatcgagcgtgcgcgcgtaatcgaatatctccttgaaatacggcacggccgcctcggatgccgagtcgttggcggcgtcgatgagattccaagcgccggaggcccccggcattcttttcgtcgaaggggacaattcagaacacaactgccgacacaatcgtcagggaggccagcgagaacagcgtgcttacaagcacgaagccgaccgcatactcgggcatgttgttcttgcgaccggtgaacatggcaatggtggtcatggtcggcagtccggcgatgaccgtgatcatcagcaccatgtcatgggtgatcggcagttgcggcaatgcgccggtcagcgcggtcagtagcgcgtagaaggcgagcgggaatgcgatcatcttggcgactaggccagcatagagttcgtagcgtctgaggacgccccaccacttggtcagcgcgaacaggccgcccaagtagattagcgacatcggcgtggccatattgccgatggtgtgcagcggcttcaggatgatgtccggcaccttgacgccgagcagaatcagaatcagggcgagcatcacgccgatgaaggcgggattgacgaatcgtttaagcaggccgaggacgcgggtgcctggcgaggggcggacgacggccggagaaccaccgtttgcggcattgctcgccgaaccagcattgcccaccgaaccggcgccgttcaccgaaccgttcacgaccgcacctcgcgcgccaatcgcgttgccgccagtcgtttcgtcgaccggctcgcacagccatacgccgtacgtccagagcagcgtctggtcgatgatcgacatcagcgccacataaatcgcgccgttctgcggccaaagtgccataatcaacggaatgccgatgaatccggcgttgccgaaaataagcgacgcctgaaatacatggctacgcgaacctttgagccgcaacagttcggcgaccagccagaacaccaggatgagcagcgcgtacatcacggcggtcagcagcatcacgccccagttggcggcaagctgcgcgcggtccgcgccgtcgacggcgttcgagaacacaagcacggggatgagcacgttgagcagcagcgagcacatgccgtccaacgccgtctgaccatagaaccggagcctcacacatccgtatccgaccatcagcatgatcagaaatccgactaactggccaatcatgacgccgaactgccccatgcacactcctctcgtttgctctcccgcgatttcctgtcactggttcatataggcagccatctggacaggctcggcggcacacgcatcagtatgttcgataccaccacatgccaatccacttctcgttcaaccgttccccgtgctaatgcgccgccggccaccccgtgttgccggtgctgcgcgagcaccgctacgtgtattgcattccggtggccctcgggcgcaacgtgtgggtcggcgcgaacgtgtcgattctgccgggagtgaccatcggcgacaattgcgtgattggcgccggttcggtcgtgacacattccatccccgccaactccgtcacctacggcgcgccctgcgaggtcgtgcgtgaaatcggcgacaaggaccgcgagtatttctacaaaaatcgcaagctcgacgtgtgggagtgagctttcgcgctactgctctttgagcttaaaacgctcactgaattggcggtcgcgccagtagtagacgtcgtcgcgttcgttgatttcgcgaattaccttgcacgggctgccataggcgaccgtgttggcggggatgtccttggtgaccagcgagttggcgccaatgaccgcgttgtccccgatggtgaccccgggcagcacggtgacattcgcgccgatccagacgttctcgccgatgtggactggcaacgaatactgggcaccctgatagcgcaggtccggacgcacgggatggccggtggctacaagcgtgacgttggggccgatcatggtgtgggatccgatgaagatctcaccatcgtccaccagcgtcaggttgaagttggcgtaacagcgctcgccccaataagtattgcagccccagttcgcatacaccgggcattcgaggtacagaccatcccccgccgcgccgaagaacgcctgcatgagttcggtacggcgcttcgggttggtcagcggcgtggcgttgagttcgagctggagatcacgctgggcggcctgcagatcaaaaaagccgtccacatcatccggcaggtagacctcgccagagaacataagcgccattttctcgcgcgtcgcatcatcgataatcggcttggcgatcggcttgtcttcggtcatcattggctcctgttcggcgttttggcgattgtgtcggtcgaactattctgtcacagactcgttttcgacacccagcatcgagcgcagccagtcaaggattcagatgtgcgattggcaccgtgcgggcctcacacttttcttattgagaacgattcgccgtgcagtcaagccctccatccacccaaaaaggactcgcttttggccgcgtcgtcgcggtaggccttgccgaactcgtcaatgagcccatggaattcctgcaaatccttgacactgaggttcgtatccagcaccacgggcgaataggccctgtggaatgccggatagccggccggcacgtcgaatccaaggaaggcgaacagccgccgcgcgtaggtatcggccacgaatgtgcggcgcgagaacacgtacagcatcagatcgtcggccgtctcgccgccaataccaaataatccaagcaactcggcccgtaattcggcatcggaaatagccgcggcaccctcgggcgcggccccgcaacgctccacataccaccaactcagcgactgtacggtcttggatttgttgacataaaagcctgacggtcgaatcagttcctgcaaacgctccggctccatggccaccagcttatggggttcgagcacaccctccgcgttcaacgccgcaagcgaacgattcacattgccccacgccgtattctgcgtcagcaccgcgcccaccataatctcgaacgtggtctccgccggccaccatccggtcgggccgagtgcgtcagccatggtgcggtacagcaattcgatgcgctccggcacaggccacttgtgtgcctggttggctttcatacgtttcatattctgcattcaggctccgtattagccatccgccattcatttattaggtcgattatgcgttcattaggtcacttgtgatgaacactgccttcaagaatggcttcattccaatgctcattatctcatgctaagcagggcaccgacctaatgaacgcataatcgacctaatgaacgcaacggtaaggaaaaactacagagattcagcgagatatgctcggtccacctggtctggaagtcgaaaatcttgatgacatctaccgcaattcgtgcaggattcgccgcatgaacgggatggtgaccacgaatgtcagcacgtcggacaccgattgggccatttccacgccgagcacgccgaacatcatcggcagaatcagtacgatcggtgccaaaaacagaccttgtcggcacagggccaggaaggaggcgatgccggtgcggcccatggtctgggtcatcatattgcccatcatgttgaagccgttgagaatcaccgtgcagcattggatgtgcagcgcggccacacccaccgcgaccacggccgggtcggagcggaagatctcgaccagttgcggtgcgaacacccacagcaacaccgccaacaccacgagcacgcaggtggcgagccgcacgcagaaccagtacccttctttgacgcgcgcgaacaggccggcaccgtagttgtagccgcacaccggttggaaaccttggccgaggccgacgatcaccgagttggcgcccagcataatgcgcatcacaatggccatgccggcgatggccgcatcgccgaacggattggcggcaatgttcacgcaggtcacggaaatcgaaccggcgccttggcggatcagcgagggcaggccaccgccggccacttcgcgcatgagcagcacatccggcctgcaattgcgcagggacagtttcatcacgccgaatttgcggctcattgtggtcagaatcgtgaagctcaccgtctggcagatggcggtggccaggccggcaccaaaaattccgaggtgcagcacgaagataaacaacggcgcgagcaggaaattcagcaatgcgcccgaaaccagcccgatcatgccgaacgccgattgcccttggtatcgcagcagtccgttgagcgcgaacgacccgcatacacagggtgcggcgaccaacaacggcgtcaggtattgcacggcgtatggggcgattgtcgaggtcgatcccagcatgacgaccagcggccgcagggtcagcaatccgattgtggcaatcaccaaaccagagagcaccgcacccgcgaagcccacggccagtagtcgggaggcgcgctcattgttctgtttgccgagttcgcggctcatcgagttgcccgcgccgttgccaaagaagaagccgagcgcctgcatcacggtcatgatggagaacgcgatgccgatggcgccggactgcgcggtgccaagctggccaataaagaacgtgtccgtgagattgtaggcagtggtcaccagattggagatgacggccggcaagcacagtttgagaatcagcggcttgaccggctgcccggtcatctgccgatatttcgcgtccgcgctcgcgcgtctaatgccatgaatctgcaccatggacggctatcctactcgcgcagggtcctatgcaaaggcgcgttaccgccatacgagtcagcgcagataccgcccggtgatgctgttcggattggccgcgatttgttccggcgttccggtggcgacgatgcgtccgccgctttcgccgccgcccggacccatgtcgatgatccagtccgcattggcgatcacgtcaaggtcatgttcgatgaccacgactgttgcgccgctcgccacaagccggtcgaacacgcccagcagcacacgcacgtcgaacgggtgcagaccgatggtcggctcatcgaacacgaataccgcgtccgattgggccttgcccatttcgctggcgagtttcagccgctgggcttcgccgcccgaaagcgccggcgtcggttcgccgagcgtcaagtagccgaggcccaagtcgtgcagggtggtcagacgtgcgtgaaccttcttgaggtcgctggtcacggccagcgcctggtccacgctcattgccatgagttgaggcaggctcaacgaaaggtgcgattctcccttaacagcacgccgaatcgcgccggcttcgggcgcataccgggatccgccgcaatccgggcattcgatggtaacgtccggcaggaactgcacgtcgagtgagatcgaaccggtgccgtcgcacgtggggcaacgcagtcggccggtgttgtatgagaaatcgccagccttccagccgcccgccttggcgccgtccgcgcgggcgaaggcgcggcgcaattcgtcgtgaatatcggcataggtggccacggtggaacgcacgtttgcgccaatcggcgtggcgtcgatgagattcgcgcgactgatgcccgcggtctcaagctcgcgcacgtgttccggcaacagctcccccgccgcctgcgctttgagtgcgggaatcagcgattcgagcaccatcgtggttttaccggagccggagacgcctgtcaccgccacgagccggccgcgcggaatatcaacgtccagcggcttgaccgtatgcaactggctggttgtcatgcggatgtggccaaggtcgaacacctgcggttccgccacgcgctcacgaatacgcgcgtttgcctgatctgacaggaacggtgcaatgcggctgcctggattcgccgccacctcgccgaccgtcccttgcgcgatcacatgccctccttcggcgccggcaaccggtcccatttcgataagatggtcggcggccttgagcacgcgcacgtcatggtccacgaccaccacggaattgccgtccgccaccaagtcatgcatcacgccgagcagcccatccacgttcgagggatgcaggccaatggacggctcgtcgagcacatacagcacgccggtggtgcggttgcgcacggcacgggcgagctgcacacgctggcgttcaccggttgaaagcgtggcaccggcgcggtcaagcgccagatagccgaggcccagatccaacagtcggcgggccacgtccaggaatgattcgcagatgttggtggccatcgtccgcatgtcggcaggcagggattccggcactccgcgcacccaatccaccgccgcatccaaggtcatcgcgctggcttcggccaagttcagcccgcgcacatgcggggcccgggcgacggcgctcagtcgggtgccgccgcagtcggcgcacggcccctccttgaggaaccgggccacacgcttcaggcccttctcgtccttggctttggcgagcgcgttctccaccgtgtatacggcgttgaagtaggtgaagtcgagttcggcgaaatcgtcgcctttcttcggcttgtagaggatgtgctttttgacggccggcccgttgaatacgatgtcacgctcttcgggcgtgagctcgctgaacggcacattggtgcgcacgcccatcgcgccgcacacttgcttcatgaggtcccacatgagcgaaccccatggcagcaccgcaccgtcgtcgatacttttcgactcatccggcaccagggccgcacggttcacttcgcgcacaatgccggttccggagcaggtcgggcaggcgccggccgagttgaaggcgagcgattcggcgccgggcgcgtggaattccttgccacagccagcacaggtgatgggcagtccggccgccacgttcagcgtcggttcgttgcgcgccccgcaatgcgggcacacgtgcgaggcgacgcgggagaacaggagccgcagactgttgagcagttcggtcatcgtgccgaacgtcgagcggatgccaggcacagtgggccgctggtgcagggccagcgcggccggcacatgcagcacttcgtccacttgggcgcggctggcctgggtcaggcgacggcgcgtgtacgtggacagcgcttccaggtagcgccgcgaaccttccgcatacagcacgccgagcgccagcgagctctttcccgaaccggagacgccggccacgcccaccagttcacccagcggaatgtcaatgtcgatgttcttgaggttatgcacgcgcgccccgcgcacttcgatcgcctgcggccactgatcgttgctcatgctcggcactgctccgccgccgcgctatctgacctctgttcgagtgtcacgccgtcacctctttctcgacttcgcccttggctgccgccgcctgagcttcctggtctccagtatcatcacggccaacgacggcggccgaacgccggacgagaatctttcgtcttgggcaccgtccgccacctgcaattcgaactagctgaaccagcgtgacgatattgtcggctatcgatctgccgtgatcgtaatggacatcgtcgtccggaagcacgtcaccggttccgagaggagtcggcggcgcgctttcataagggcacacaatcccaagatcacacccacagatcaataccgatcaatactcgtacgtgatcgcggggtcgccgatggtcggcgtctgatccagtttgaggttggccgagccggccgcggtggtcacgtcgtattcgatggtcaccgtgtcctgaggcgccagggagatgtcgtccatgtaggtcatatggtccttggcctgcacctgtgcgaaggaactgccgttcgacgccgacacgttgctgacctcgcctccggccggcgtgtagatgaccacgcggttcaccgccacgcctcccttggcgttcgccgtgatgtattccggcagggatccggcctcgcccggctgcagggtgttggtgaacgaatacgtaacgtggtaggtgttgtcgccggtcctcttcaccgtcgacttgcgctggatgtaccagtccatcttcgaggcctgcatctcgttgaagtagacgccggtcaccgggttcttcgcgtcgttggtgatctcgccggtgacgccggcgctgcgcagcaccgcctgatcctcctcgtggaacgaccagaagtacaggtgccgctgctcggccatccggagcatcgtcttggcgacggtcatgagcttctgcgtgttcatgtcgctgaacaggtgagcgaccgcctgggcggcggtctcgctgaagtactggtcctgagcagagggcgtcagttccttgtaggcgccgttgagcaggaattcggcggtgttcgacccgttgagcacgcgcccgtcggacagggtcacgtcgccggtggcgccgatcatcgcctgcagcgcgacggggtcgagcgacatcacgccgtcggacgatccgccaaacggagccgcctgccagaacttctgggccatggacgcgacgcgcgggaagtccggcgtggacgaaagattatggatgacttgaccgaagtacagtccgctgtacagcgtgccgtcaccgtcctggttgacgtcatccaacgcggcgttggaggggaactcggcatccgcgtggaactcccccaccgcgatcttgccgttgtccgcgctgaaggaaccggccgaaccgatcaggccgccggttccgcggatctcggaattcgtctgggccagcagcacgtagttgcgggcgccgttcgcaccgaggaagttcggcagcatgttgagcatgccgctcaggttttcggtcacctgcgccagggcggccatctgcgtcttgccgttctgcagcgcgttgttcaccacgccgagtttggcgtcgggaagatcctggatcgtcctggcctgcgattgcacggactggtcgaccgtggcaagctgctgcgccgcggcgatgatcggctccatgttgagctgcccatcgccactggagaggctggcaccggtcagtgtggtgacgaccttgcccagctggggcagcgtggtctgcgcgaagtcatcgatggtaccgatggcggtgcgcgccgtcttcacgtcaccgccgaccacgggcatcttctccgccagcgtccacagaccgccgctgacatcctgcttggcggcggccgcctccttctggatgtagctcacgtcggacagcgccttgaccatgtcgtcggtggaaccgtccttgatgaccttggccgcgttgacgacattgttgaggtgcgctttggcgctcatcgccgacttgtacagtttgaatccgctgaagccggccgccgcggcgcacatgaccagcaacagcagcacgacgagcagcgcgttgcgaacgcgatgggttgtcctggggaccgtgcgtgcgtgtgatggcatgggctacttccttacgttatgacatgtatcgatactggctggctgcccggttacgctttcgctggacgggtagcccggcggacggcacgtagcagtgcacgacgtgcacatcgcgtatgacgccgggggtcgtcagcgcggctgactggggtggccgcggaccggtacctggacttgcagctgccctccggcgatgcgtgtcacctgcagcggggaacgtccgctgcagttacggctattaccggccagccgacagcaatcgctggtttagttgttggtcttttccggctggtcacccgttcccatgagctggcatgcacctttcagcgagtatctctcctaccgcatgccagtctacccatgcctgcgggataacccaaaaagccttgcaagaataccgaatttctttacctttggccctgatcgttcgacggctcgcaagacggcgtaacctcatccaaccggccgatccccggaggcggaaccagcggaatcctcgtgaccgggaatgcgatcgttcccgcttgcgcgatggcggatgcgcgcaacgccaacgacgcatcgacaagccactgtatggcactctcaaaatccttgccacgtccaccagctcgcaccacgccgtatacgaacttcttgttctctttcgccaactgggaaggaattgaatcccatacctgattgagacgaagcgtggtgacggcgggactatcacgcatatcaacatgtttggagaaatcgtcacgataatcggagaccagactattctgcaatttacgaaccgccgtgaagtcaggattcggcagagtactggcgaacgcttcaacgatctccggcatgcctcctgtatacatgaaataccgcagccaagtcatgaccctgtcatgcattacgttaattagcggaaaatccttggactcaagcatttcggccaaggcacactgtttgcacgcatacaggaattcaacaaaagacataggatacagcttgagtctactgaccttgccaaccgggaatgaaaacccaagatgcatggcgatgccaagcgccgatccagtggccaagacgtcatactccggggcggcttcattgaacatcttcagcgaagtcatcgccctcggcacctcctgtacctcatcgaaaatgacgagcgtatcctcgggagtgatcctagttccggacttgatcgacagtgcgggaatcagccgttccacattcagatccgcatcaaacaacatacgcatgttggcattgtcgaaaaatgtgacacaacagcaatacgtaaggtacttgacaatctttgatggagtcgtatactcatatctgtcaggtacttgacataattactgaagaggatgaaaaagacacacgaccagcgacgcttcgctcgcttccttattaaaggagaccggcatgaacatcacacatgacatgagcaacgacctcaccgaatacgacccggaatcccgtcaagtagacggaccgaaccccatcgaaaaccgcatcagctcctccgcggcccgtgttcccgacatcatcagctgcacttccggcatcaccgtccagggccgccaactccactcgttcgcgttcaccacggacgcggccatcatccgcaacaccaatgccgacgccattctcgccgtatatccgttcaccggcgaaccagtcatcacccaggccctactcaccgtggcccaggccccgctgttcgtcggcgtgggcggtggcaccaccaccggcccgcgcgtcatccaactcgccatgatggccgagatgcagggtgcggcgggcgtggtgctcaacgcgccggcgccgccctccacggtgtacgacgtggcgcgcatcacgaacaccccggtcatcgccacggtcctgacctgcgatgacgaattggacgagaaaatcgaggccggcgcctccatcatcaacgtggcggccggccgcaggacgcctgacgtggtccagcagatcaggcagcgtcacccctccatcccgctgctcgccagcggcggttcgaccgacgagtccatggccgaaaccatcgtggccggcgcgaacgcgctgacctggaccccaccgaacgcgcaggagatgcagcgctcgatgatgatgcgctatcgcggcgaatccaccggcgacaacatgcagcactgacgcaaggattccgaacatgagcagcaccagcaacaacgccgccgtaaccggaaacgacgcggtcgacgacgtaatggccacgagtcaatcggcggagaacggcacaagccacaacaccgccgacggcgatatcaagaacgatgttctcagcagtttcatcagcattggccgcatcatggcgtatcgcgcgatacacagacggctcgtctcccccggcgccaaatcaccgcgcggcgaacatgctttcgacccacgccgtggccaaggccgcgtcttggccacgctcagggaatccgaccagaccagccagaaggacttggccgcgatgttcggcatgagccgccaagccatggccgaactgttgaagaaactggaggccagcggtcacatcagccgccgtccgtccaggcgggacagccgcgtcatgatggtcagcctcaccaaccagggccgcaaggccgccgatctgctgggcaaagcgcccgaccagacctcctccatgctggactgcctcaatgaaaccgagatacaaaccctacacggctacctgcagcgcatcatcgacacctcctccgacgacctaccggcctcgaccgccgaggatgtcaaaaagtgtgagctgcttatcgaacacctcaagcgcaggcgaatgccggccgaccgcgcatagttcgcgaacagcccgcacgacttgtggccgcataagcatgcggccgcacaacagtccagccgcacagtcatccagccgcccctacaaacacgcccgattcaccatttgcacgacatcttgcaccaaaccctacttgaaatgcggtattttgcgccaaaaccccattttgaaatgcggcattctgcacatacaaggtagaaaatgctactcccataagggattcggaaaggaactgccatgcttgagcgcaagatctcggacgatctgttggaatggaagctgatcggcaccggcaaagcactgctgctgaccggtgcccgccaaatcggcaagagctacgcagtacgcgagttcgccaaacacgaatacgctcattaccttgaaatcaacctgtacgagaacaagcaggcggcccgcgcgctcgcatcggcgaatgacgtgcaggagttcatcagccgacttaccttgttctcaccttcaacgctcactcccggcggtacattgattttcatcgacgaggtgcaagaggcaccggatgtaatgaccacgtcaagtttgatgtaccggcgtcgcaattcggcgatttgacgtttcaccacatgtcgctgattgcgaaaaacagcaagtcgtgattcgagcgtggcatcaccttgcttagtcatatcaacaaaatccttgatctctgcgagactcatgcccgtggatttcagacattcaatgagatcaagcaattcaagatcgccgtcatcgaagcatctccgtccgaaaccagttcaagcgataccgggcaaaagaccttggccgtcatagtagcgcaatgtatgttcggacagcccagtctttcgcgacacctgaccgatggaatatcccatgccaactcctttccctgcaatcgagccagtgtgagtccagccatattcacggatgtcctatgcggaacggacactcttcgactgcctgaaccttgcagcccaaacatgcatcaatcagcacaaatcacagacagtgggccatatacaacggcaacttgatgcgctttccatccacttcaagctggcggggatgcagaacgtattccttgcccaatcgttgggcataccttttgcggaatttgtcgagcgaagatacgccgtatcgtttcgtggatttcacttcaatcgggctgatgcgaggcttcatcgcggcattatcgtattcccgaacgatgaggaagtctatttccatggttttcgtggcatccgccctatccgagcgcgagaagaaatacagtttgcgcccattcgcccggaattgctgagccaccgcattctccaccagcatcccttcgttgagcgagagtttatcgaacagaatatcccggtacacatcatccggcgttgtctctcgatcggcaaacgcctgcgacaccagcaaaccggtatccgccatatagcatttgaatgaatcgttatcttcgtacaatcccagccccaccaaagggtcagtcgaattacggcacaggttcaccaagcgggcgtcttccaaccagaagaacgccgaatcgtattcacgagatcgagcccccttatcgaccgatgccagagtgaatcgtttctcatgcttggacagctgccctggaatctgagcgaaaatgccccgcacgcggccggcatcgccattggcgaacttgccgatatcatcactgtacagctgcaggatgccacgcttgatcaaatccacctcgccaaaatcgcgctgctcgacataatcggcaaccgcctgcggcataccgcccaccagcagatattcgcgccacagcctcatcgctcgtttgtgcagcgcatcgggcaacgggaccagacgctcgaacgatttgcgaatcgtttcagcaagcagctcctcccccatggcccagcagaactcctcaaaatcgagcggccccatatccattttccgttcctcggaggggatgacgatattcgccacattcctcttgatggagatcagcgaaccagtttccacatagtcataccggccatccgcaaccagatatttgatgagctccctcgccgccggataccgctgcacctcgtcgaaaataatcaacgattcacgctcgtacagtcgcttgcggtaatacgcagacaacagcatgaaaaatgtgtcaaagtcatcacgctggttttcgaagatgtcgcgaacgtcgcgcggcaaacgtgtgaaatcgatgagaatatatgacttgtactgagtgcggccgaattcctcgacaatggtgcttttgcccacacggcgagcgccttcgacgagaagagcctcacgcccacccgctttttgtttccatgcgatcagcttatccagcatcttgcgcttcaacatgagcaatcacctcattacacgaaaacaacagtatggacatatgctattttacacgaaaacagaagtatagaggtagccgattctacacgaaaacaacggtatggaaacatgcaccgaaccggctcacccccactccccccccatcacaccggcgccctgtttgattgtgcgattttgtgcgaatggctcacacggttcttggtgagaaccgttcgctgcgtacctgaccctagaaccggatcagcgccttgatgaccttgcgctggtccatcgcttcgtaggcgtcctggatatggtcgaggtcgtactcggcggtgaacacgcgaccggggttgatctcgcccttgagcaccgcatccagcagaccgtcatcgaggtcatagtggcgcacgggagccgggccgcccttgatgccgatgttgccgtagaacgtgccttcggcgctgatctccacgtcgtgcggcaggcccacacgaccaatcacgccaccgcggcgaatcaggccaatcgccgtgtcgaaggactgcttggagcccacgcattcgagaactgcgtccgcaccatagccaccggtcatctccagcaccttgtcaatagcctcttggccacgctcgggcacgatatcagtcgcaccgaattcgcgggcgagcgccgcgcgatcctcgtgacggctcatggcaataacgcgcgtggcaccgcgcattttggcggcaatcacaccgcacaggccgactgcgccatcgcctatgaccacggcggtgtcaccgggcttgacctcggcagaaaccgccgcgtgataaccggtggacatcacatcggaaacggtcagcagcgaagcgagcgtcgcgtcatcgtagtcttccggcgaaccgggcaccttgaccacggtgccgtccgcctccggtacgcgcaggtattcggcctgacaggcggagaagtagccgccgtgagggcatacggattcgaagccggccttgcataccgggcacttgccgcagctgtacgggaatggcacgaccacgaaatcgccgggcttgacggattcgaccgccgcgccaacctcttcgaccacaccgatggactcgtgacccacctggctgtgcgcggcctgtccgctcagcccacggaagaaccacaaatcagagccacacacgcatgtgcgcaccacgcgaatcacgatgtcgtcatcctgttcaagcgtcgccttcggcacttcttccacggccatcttgccaggctccacgaaaatcgcagctttcatggtttcagacatacgttcataactccttgttttccggcatcgagcgcttaaggcccgctatcctcgtgttctattagacaataatcgccttgcattaaccaatagccataaaccatgtttcgccatacccatgaggtatggcaacaaccgagcaattcactgcgataggccaatatccgagatacgctcactgttcgattcgtcgccatgagtaatctggagaaccggcgatgggacccgcctgaacttgtttcgaaccgcacactgctgatagttcctacacacgatttgacattgcatggaatcgttgtgtcttcagtaggattcagcggtttcaggaaaggctattatgggctcgcaatccccatccgcagatgcccggccgggcacgcgcacggccactcctccggcgcgcaaactccccgatatccatcttgatattgtgttggtcgtcttctgcggcggtgccatcggcaccgcgattcgctatgcgttcgcgcagattcccgcagccggcagcttccataccggcacgtttgtggccaacatgctggcctgcttctgctatgcgggtctgaccgcctatttggccggctcttcccggttcgacacgcgtgccaaggagctcaccagccgtgggctcggcatgggcgtatgcggcggtttgtctacgatgtcgacgttggcattggaaggcttcaccgcgattcgcgacgatcaggtggcggccggcattgcctatctactggtgacgttcgcgctgggtctggtttgtgcgtctgccggcgtgtgggcaggaacgcatctggccggctcctcgaacgcatccgccgaagcgtccgctgatacgaatgccgctacgaccagcaagggaggtaaggcgtgatgaccgtattcctaccaatcttggtctgcctgtgcggcggcgtaggcgcctcctgccgctatctgcttgacgcgaccatcaaaacgtattggcaacgcgcattcccgctgtccacattcaccatcaatctcatcgccggattcctgaccggtcttgttgcggcgctggcactgggcgggacacttgatgaaccgtggcggctggtgctggccaccggtttcctcggcggattctccacgttctcgaccgcgatcaacgaaatggtgacgctcttccgcaaacgccgctaccccacggcaacggcctatctggtgctgtcgctgggtgtgccggtcgttgctgcggcctgcggttttctcgtctgaccgccacgacgattcccgacgcggtcagcggtatcatcgcgaggtcgaacgtcacaggtacatccgggaggtatatgggcatggcgaacaatggagcggatgtgaagcacaatcagggcgcggacgtcacgaatgcctcggccacgacgaacactgcggaaaataccgtgggcacggcaaccccgaagcaaaatggactcgccgtgttgggcaagtatatgggtgtttccgccacgcagaccattgtggagtatgcgacgttcgccatcctgcacttgatcggcgtgccctcgcagatctccaacggtatcgccgtggtgtgttcggcgacctacaacttcgtgatgaaccgcaacgtgacgttcaaatcgtcaagcaacttcacccgttccgtgatgcttttcgtgctgctgtggatctggaacttcacgttcagcacactgctgatcggctggatgccgggcgcgacggacctgagcccgtatgtggtgaagttcattgcgatggcctgccagttcggctggggttatccgttgtgcaagtacgtgatttttaggtgacgcattccaattgctcactgtcgttcgccttcgcctatttgtatttggagcgcttatcagaagaacagcatcgcaacacctgcggcgaaacacatgagcagaatcgatgtcaggaagctggcgagcatcggcttcttgcccttggaagcgatggccttgaagttcacgttgatgccgagcgcggccatggccatgccgagcacgatgtacgcaaagtccacgagctgcggggtgatggaggcgatgagcggcacgaaggtgccgatgatcgaagcgccgatgaagccgagcatgaaccacgggaaggccacggtcttcttgccggtgttctccacctcggagtgcttcttctcccaccagatagcgatgatgatggccgcgaacacgagcatgagcacgcgggaaagcttcatgatggtggcgatgtccaccgcgccgaaagcgtcgccggcggcgaccgcgtgggcgatttcgtgcagggaagcaccggcggtgatgcccagctggtccttggtcatgccggccagcgggccgagcgcgatctccagcaacgcgaacacagtacccataatggctacgatggccacggccatggtcacgtcgttgtccttctcgtcctgcttgtcctcaggcaccttgatggaaccggctaggcccatgacggcggccgcaccgcagatgccggtgccaccggcggtcaggatggcgagcatcgggtcgacaccgagcttgcgggcgatggcatagcacacgatgatggtcagcgtgacgaccacagctgcgatcggcagacacttgatgccctgcgtgaacagcacggcgaggttgagcttgaaaccgagcaggatgatgccgaggcgcagcagcttgttggaaatcaggccagcggcgtccttgacgcctgccttgcggccatcattggaaccgacgtaggcactgcggatcgggaactggatgatcataccgatgagcagcgcgatgataagcgcgccgaacaggctgaatccggggaactgcttgagccaggaggcgaacagcgaggccagcagagtcagaacgccaatgaacaacatgtcaacggtggtaatgcgcttccaccattttgtacagaactctctcacggtgtctattgaagctcaagcatttacatcggtcaaatcattgcaaccaatacatatcatcgattttgtcgatacctaattgatctccctctgatgagggaggtggccgccgcaggcggacggagagagaaacaacgttcgcgacctcccctcagtcgactatctgactacccgcgcagcgcagcaataatcatctccgccaactcccgctgatcgtgcgtcagaccggatctcggcaccagcgcatagaaccgccgcacaaactcatcgccaagctcccgctgcaccggcacgcccgccggcacggcggcttccgaaatcaacgactgcccgaacccggcggacagcgccgccacaatcgccgcattactggacacttccatcgtgcgtgcaggcacaacctgagcggtcttgaaatacaaatccgtgtaataccgcacgccggaaccgtgctcgcgcaccatccacacgccgtcgggctcccccgccaacaccagccggtcctcgcacagggtgacgcggtccaccgaatcgttcacgatcggcttttccaccacgccgagctgcacggccttcatgctgacccgttcgagaatcgcatccgagttcatcacgtgtacggcgaagtcgaaactgtccatgttccgagccatcaccggcaacgccttcggcagcagaatcgccgcggtcgtgtgcgagaacgaaacggccagcggctcacgcgcctcctgcacgcgggcgatctgctcacgcgtatcccgccataatccgtcgatgccgatggcggtctggtacagcatccgcccggcctgtgtgggcgtcacgtcgcttttcgcattgcgcacgaacagcggcgcgccgaccatctgctccaattgggcgatacgcgacgacaccgtcgactgcgacaccttcagttcgtcggcagccagcgtgaactggcccacctcgtatacggcgaccagggtttcgagcagagggaacatggtttaactgtacgctgtatgatgcacgaatatttcaattagcttgggcgtagccctaggccacggacctggaccaccctcagtctcgctttgcgagccagctcccgccagcgggaccccaatggttttcatatcactatgcttcgcgcagttttgcgagctgtgttttggccttgtggagcttggcatagatttcattgcgctgaacaggattcttgacgcgctgatggtcgcgggtgagcttgtccacttcggattcgagccgagcaatttcagtatggcgaatgatgcgcgcatccagattttcgatctccggcgtgcccagaatggtctgtgagcacagcgaggcccacagctcatcaatagtagagccggccagctccagctgggcctcccccgccggctgccaatcgccggcatatacccgatagatcggcgtgtggccggcacgccccggtatcgcccgacgcacggcgaacgcacattcctcacgtgtgctgccctcgaacggcacgtcgcgtacgcacacgaacacgatgcccgatttacgctgcccggcaatcaaatcgatgacctcgttcggtatgccagtggctttggccgtaagcttcagtccgatgaccagcacttccggaaccagtttgccgtccgcaagcccagtgttaatcgaccggaccaacgccagcatggtaatggattcgatttcgttcaccaatcgctgcttgagtttgcctgaaatcggtgccttgcccacgaacaaggctttcggcagtgtgcctttggcttcgggaatcgccgtggagacaggcagtcccagtgaaagcgcggatacggaaccacagtgtgcggcttgcgaaccagtcatcatcgaccttctttcccggcctgccatcagtgtcataccctcgcagtgcagcagtccgtttatctattggaaagcaacactagcgcatccaggccggaagtcgtggtacatatccatatcctgctgcggttataggaaatcccctccgagtttcctcgaaggggatttcttaagtcgctagttcaagcgaagattcttgtctgatgataatcaggcgaggatcttggtcacacgaccggagccaacggtgtggccgccttcacgcacagcgaaggtcaggccctcctccatggcgatgggctgaatcagctcaacggtgaaggtggcgtggtcgccgggctgaaccatctcgacgccttccggcagctcgatgacgccggtgacgtcggtggtgcggaagtagaactgcggacggtagttggagaagaacggcgagtgacggccgccttcgtccttggtcagcacgtagacttcgccctcgaacttggtgtgcggggtgacggagcccggcttggccacgacctggccacgctcgacatcctcacggccgaggccacgcagcagcagaccggtgttgtcgccagcctcgcaggcgtccatggtcttgtggaaggtctcgatggaggtgacggtggtctgctgggtcggacggataccaacgatctcgaccggggtgttgacggccagctggccacgctcgacacgaccggtgacgacggtaccacggccagagatggtgaagacgtcctcgatcggcatcaggaacggcttgtccaggtcgtgaaccggggtcgggatgtagtcatcgacggcggccatgaggtccttgacggactggacccacttctcgtggtccggagcgtcgtcgtgcagggcgccgtaggcggaggtgtggatgaccgggcagtcgcgatcgaagccgttctcgtcgaggaggtcacggacctcttcttcgacgagctcgatgagctcttcatcgtcgaccatgtcgcacttgttgagggcgacgaggatcttcgggacgccgacctgacgggcgagcagcacgtgctcgcgagtctgggccatcgggccgtcggtggcggccacaacgaggatggcgccatccatctgggcggcaccggtgatcatgttcttcacgaagtcggcgtggcccgggcagtcgacgtgagcgtagtgacgcttctcggtctggtactcgatgtgggcgatgttgatggtgataccgcgggcggcctcttccggagcggagtcgatctggttgaagtcgtactccgggttgacatccgggaactcctcgtgcagcaccttggagatggcggcagtcagggtagtcttaccgtggtcgacgtggccgatggtaccgatgttaacgtgcggcttagtacgctcgtacttttcctttgccattacttttgtcctcctggacgtctcgtgagtttcctgcgccctttcgcacagggactcgcttattctactgggtttctgggttatgtgccactttgaagagccagaacccagtcagcggtatacgatactaccgctgactggagacaccggccacttcatgatgtggcgcgtgtcactcgccgcgctgggccttgatgatctcctcggagacgctcttcggcacctcgtcgtaggagtccatctccatggtgaacatggcgcggccctgggttttggaacgcaggtcgccgatgtagccgaacatctcggacagcgggaccttggcgtcgatgaccttgacgccgacaccgtcggtcatggactggatgttgccacggcgctggttcagatcgccgatgacttcgcccatgtactcttccggcgtacggacttcgaccttcatgatcggttcgagaatgaccggcttggccttcggggcagcttccttgaagcacatggaacctgcgagcttgaaggccatttcggaggaatcgaccgggtgcatctggccgtcggtgacggtggccttgacgcccacgaccgggaagccggcgagaacaccggactccatggcctccttgacaccggcctcgatggggccgatgaattcggcggagatgtggccgccggtgaccttgttctcgaactcgaaggtcttgccctcggtggtgtcgagcggctcgaagttcatcaggacctttgcgaactggccggaaccaccggtctgcttcttgtgggtgtagccctggtccatgacggccttgcggatggtctcgcggtaggcgacctgcggcttgccctggttgcactcaaccttgaactcgcggcgcatacggtcgacgatgatgtcgagctggagctcgcccatgccggcgatcagggtctggccggactcttcgtcggtcgtgacctggaaggtcggatcctcttcggccagcttggacagggcgatgcccatcttctcctggtcggccttggtcttcggctcgacggccacctggatcaccggatccgggaaggtcatggagtcgagggtgatcgggtcgttgatggagcacagggtgtcgccggtggtgacgttcttcaggcccacgaaggtgtagatgttaccggcgtcggcgcggtccatcgggttttccttatcggcgtgcatctggaagatcttgccgatacgttccttcttctcgcgggtggagtcgagcacggagtcgcccggcacgacggagccggagtagacgcgcacgaacacgagcttgccgtagaacgggtgggtggagatcttgaagaccagagccgcgaacggatcggacttgaccgggtgacggttgatctcgacggactcgtcgccgggcttgtagcccttgatggccggcacatcctcgggggacggcaggtagtcgacgacaccgtccagcatcggctgaacgcccttgtccttgaaggcggagccgcagaagaccgggaaggcttccttggcgatggtgagcttgcgcacgccggcgcggatgtcttccttggacaggtcgccgtcctcgaagaacttgttcatgagttcgtcgtcggcttcggcggcggcttccacgagcttctcgtggtactcctgggccttgtccttgagatcgtccgggatctcggtggtgtcgtacttggcgccgagctcctcggtgccgttccacacgtaggcctgcatctcaaccagatcgacaacgccagtgaagtcgttctcggaaccgatcggcagctgcatcacgatcggagcggcgcccagcttctccttgatggtgtcgacggagtagtagaagttcgcgcccagcttgtccatcttgttgatgaagcagatacgcggaacgccgtacttgtcagcctgacgccacacggtctcggactgcggctccacgccttccttgccgtcgaacacggcaacggcaccatcgagcacacgcagggagcgctccacctcggccgtgaagtccacgtggccaggggtatcgatgatgttgatctggaacttgtccttggtgtcgtgggactgacggctccagaagcaggtggtagcagcggactggatggtgataccacgttcctgctcctgcgccatgaagtccatggtggaggcgccgtcgtgggtctcgccgatcttgtagttcttaccggtgtagaacagaatacgctcggtagtggtggtcttgccggcatcgatgtgggccatgatgccgatattgcggacgtcgtggaggtccgaaatctcttcagccatctttttccttagttttactcagggcgagtgattaccagcggtaatgagcgaaggccttgttagcctccgccatcttatgagtatcctcgcggcgcttgacagaagcaccgaggccgttggaggcatccaggatctcgttggcgagacgctcagccatggtcttctcacgacgggcgcgggagaagtcggtcagccagcgcagcgacagggtgttggcgcggttcggcttgacctcgaccggcacctggtaggtggcgccaccgacacggcgggagcgaacctcgagggacggacggatgttgtccagggcgcgcttgagcacggccaccggttcctggtcggacttctccttgaccatatcgagcgcggagtagacgatgtcctcggcgatcgacttcttgccgtcaagcagaatcttgttgatgagctgcgccaccacggtggaaccgtagatcggatcgggcagcacgacgtgcttcttggaaggtcccttacgtgacatatctcttacttcgccttctttgctccatacagggaacgaccctgcttacggtccttgactccctgggtatcgagcgcgccgcgcacgatgtggtaacgcacacccgggagatccttcacacggccgccgcgcacgagcacgatggagtgctcctgcaggttgtggccctcgcccggaatgtaggcggtgacttcgatgcccgaggacaggcgcacacgagcgaccttacgcagagccgagttcggcttcttcggggtggtggtgtagacacgggtgcacacgccgcgacgcagcgggctgcccttcagggccaaagtcttggacttcttcggctttgcctgacgtcccttacggacgagctgttcaatagtaggcaacttgaattctccgattcagtggtttctcttgcttttgtgtgaccgccgcactgcgcccacacttttcagcacactcgcttggcatccgcctgttggcgacacccgacgaatcggaaaagatagcccagtccaccggcccgatggccttcgcccctcccgtcggcgcattactacgtgcgatcagcggtttgaaggatatcccagcatgctcgcctgttacataaggcgcgctgctggcacacacgaatatctatactacgattccgccggacaacgacgcgccgggcctcgactcactggtttggggacctcctgcgccctgtacttctcctcttcttctggcgcaacaatcccgggaatgcgtcgcacaacacacgcacacacgccctcccaacgcaatattcccgggaatgcgtcgcaaaaaagcgaacgccacacagcaggtgcccccgcggagactatgtcacacgggggcaccgccaaggaggttacattatgtttcttttcaccacatgccgcttctgtgttatctgtttccagcacatcctcgtgctcttccatatccgatgggaacctctagcgacccggcctctttgccgtatcaccttgccgctttctgcattactaattatagcaaaaccgccctcgcgaaacgcccgatacatcaatcgggagtaagcgggagcggctatgttatgcgaggtaggaaaggtgagtgaccgactgactggagtcgtaccttacccgacctttctcaccatctcaggatttcaggcagcgaccttggcggccttgtcggcgtcgaacgggtgggccacggaaacggtgctcttggcggagcccttctcgccgttgtcagaatcccaatgaatctcgtgccggtcgtcatggttgcgccaccagctggacaggatggagccggagatgttgtgccacacggagaagaacgtggacggcacggcggcgagcgggttggacgcgaaggaggtcagggccagcgtggcgcccagggcggagtcctgcatgccgacctcgaacgtgatggccttctgctgcgcgtagcggaagcccttcgggtagatcctgtacatcagcttcgagaagccgaagcccagcgagtagccgcacagattatgcaggatgaccaccgggatggccatcagagagctggccacgaacagcttcgggccattggcggcgacgaccacgccgatgatcagcaggatggccacctgagacacgatcggcagggccaccgtgaccttctcgatcttcttgccgaagatcatgtggcagatcacgccgagggcaatcgggaagagcaccaccttgacggcgttaaggaacagggattcgaccggcacgctcacatactgggaggccagcagctgcatcagcagcggaatcatgaacggggcgcacagggtggagaggatgccgatggagacatcgagggccacatcaccacgggacaggtagctcatcacgttggaggaggtgccggacgggcagcagccgacgagaatcacgcccacggccagcgggccggacaggtggaagatcgcgcacagggccacggcgacgagcggcatgatgacgaagtgggccaccgtgccgacgatgaccatcatcggctgggtgaggatgcgcttgaaatcgtccagcgtcagggtcagccccatgccgaacagcacgatgcccagcatgtagccggtgtacgccttgccccacaggctggcggccggcacgaagtagttgaagacggcccagacgatgacgatgaccgtaaaccacttggtcagccaatccgcaaaggctttaaccttttccatggtgtttctcttcccttgttcggtgtaggtaacatcgcatgaaactaggcgggtcgcggttgatatgaaacataatgctcacattgtgaacgctcacgtaatcatctctgcaatccccagtcgcaccatcacgccgttgtgtgccctgacttttcatcaatcgccacacaagacccactcgtccacatcccaccatttgagacagcccacagcctggccccaagaatgaaaccaaccacttgattccatcgcgacacaccgatgagcacacatccgcaaagttgtgtatagtattcacctgttgtgcgaattcagcttgctgaatacgacactatggtggccatagctcagttggtagagcatctgattgtggttcagaaggtcgcgcgttcgagccgcgttggccaccccagtaaaacccttccgttcgcggaagggttttgtttttctccatgaattccccgctcctgccgggaaccgccacgttgtacactcgggcatatccaattcatctaacacaaggacaaaaggtccgtcatgctgtcttttgagaacgattactcccgcgccgcccatcccgcagtgcttgaagccgtggctgaagccaacaaccatctgtatccgggctacgggtccgacgaactgagcgatcaggccaaggccaagatccgcgaggcctgcggccagccggacgcggatgtgtggttcctcgtcggcggcacgcagaccaaccaggtcgtcatcgacaccatcaccccggcgtatgcaggcgtggtcgcggtcgcctccggccatccgaacgtgcacgaggccggcgccatcgagttctccggccacaaggtgcttacgattccccagcacaacggcaaaatggacccgaccgaactggacgagttctgcaagaccttctatgcggacggcaactacgagcacatggtgttccctggatccgtgtacgtctcgcaaagcaccgaatacggcacgatctactccaaagccgaactgcaggctatcgccgatgtggcgcataagtacgatatgccgctgttcgtggatggcgcgcgactcggctacgcgctgaccgccactggttccgacatgacgctcacggatctggcgaccatcgccgacgtgttctacatcggcggtaccaaggtgggtgcgctgttcggcgaggccgtggtgtttaccaagcacaacacgccgaagcacttcctgacccgcatcaagcagcacggcgccttgctggccaagggcttcgtgctgggcgcgcagtttgacgccttattcaccgacaatctgtacttcaagatcgcccgcaacgccaatgaggcggccgatcgtattcgcgaggccctgcgcgccaagggctacatgctcactttcgaagcgcccaccaaccagattttcgtgacgatggatcagccgaccatcgaccgtctggagcgcgaggtcaagctcggcttcaccgagaaggccgacgacacgcataccgtgatgcgcatctgcaccagctgggccaccacgcctgaagaggtcgatcaacttattgaggtgttgtaaaacccttcgctaatctctccctccgtcatcgcttcgcgatgccacctccctcaccagagggaggttttttcgtagctcccgccgatgagggagctggccgccgcaggcggactgagggaaaacctctccgcaaacgagaaggctcctactcccctatcgccttgcgttccatatccacgaacttgtggaccgaggcttccacggaataatgcgccttggtgtattcggcgtatttctcgccccattcggcgcgctcggcctgatgtgcgatccaccaatcgatgcgtcgggccagcagggccgcgtcccgcacggggaacaacgactcgtcgatcagcgcgaactggccggccgccgacaattcggacgcggcgatcaccggcaccaatccgcacgccatcgcctcgatcacgctcaccgattcgatgtcggcaatcgaacaatgcacgaacaaatcgcccgaacgcaacaaatcgggcatatcggcgtgcttgtggaatccgatatcggccttgcgcgccagcaaacgcccggcgcggaacttgagatactgcttgagcggcccagtaccggcgatcaccagctgaatatcgccggcgtggcgggacatcgacaccgccttgatcagcgtaatctgatctttctcgctggccagtcggccggaagcgacgacacggaacggcacgggagccgaggcatccggatcggccggcttcttcggcgaatacaccggtgaataaccattggaaatcacgtgcaacttggctttatacccgtgcgcgcgcaacaggctcgcggtcatttcggtgggcacatggatgtggtcaatgcgcttgtacagccagtgcttgaacagccagtacaggaagctggaaataccgggaatgcgacgtagcgggccggccgaatacagcacgttctccggctgcaggtggaatccagcagtcacgggaatgcccatttggtgggcgactttagcggcacgacggccgaatttgaacggcatatagatatgcaccacatccacgccttggaaagcggtgcggaacaacgtgtcgctgggttcggcgaattgcatgagctgcttggcggccacccacgagacgagcggcaccttattcacgcgcgccggatattcgggcgcccctataccgacaagcctcacatgatggccttgccgctccaattccgcagcccattgcaaagccgaattggaggtgccgttgccctgattgcccaccgtatcgaccacaagagcgatagtcagcggacgatcaatgctctcttcaatcccgttttcgcgcattgcctcatcctaaaccaccgcgaggcaatggcgtcggccgcgctgcttggataggccggaaatggtatgggctgccgcattttgcccaatattgaatcacgcgcttcgcagcgcacgatcggcgcgggccacggcctggaacaactcggcggtgtgcttgagcagactgatgcgcacccagccttcgcccacctgaccgaagcagacccccggcatcagcgccacgccggccgtgttgagcagccaatccacgaatgcggcggaatcgccatgccaccgcgccggcacgccaccatatacattttggacagcgagccaagttccagcgccacgtccagcgcgcccggagtctccagcaggctcagcgagcgcacgtcgccgaattcgagcctcgcataggcgaaatcgttaagtacttcgactattgccagcgtgccggcttgtagcctgaaacgccggaaccggcacgccgctattcgctatatgtcgcatcccaaaatgttggcccgaccgccccatacttcatcggccggtaattgccaaggtacgacggctctgttacgcacgcaatggcatgtctatacgcagtatttatggcgggttacgggcatctgaatcttcatggggcggcaacctgcccatggggcggtatttaccccatggggcggtgaaattcccatggggcggtaaggcaaaacggcttaattccgcggtttcacaaaaccaacaaaccgccccatggactcattaccgccccatggggaatttaccgccccatgaagccggatattccgcccgtaattttgccgcgtgaggcactccgctcacgcgacataccgaaatcatcgcgtcatggcagaatgtgggtatgactgagaacgccgtgaatactgccgtgacttccgcctcctctcccgcaattcccgccgagacttccgccgtcccccccgcaactcgcgcagccaaccacccgctgggcacaccgctgggcaagcaccccacccgtgtgctgtttttgggcgctggcgagctgggcaaggaggtcacacttgaactcatgcgactgggcgcatgggtgtgtgctgctgactcctatgccggcgctccggcccagcaggtggcgcatgaataccgcgcgttggatatggcgaatgccgccgaattgcaggcattgttcgatgaaatcaagccggacatcatcgtgcccgaggtagaggccatcgccaccgatgtgctggccggtgctgcggccgcgggcgcccaggtggtgccgagcgccgaaatcgccgcgatttgcatggaccgcgagcgcctgcgcgtactggcccacgaagaattgggcttgccgactacaccgtatcgttttgccggctcgctggaagagctgcgcgccggagcttcggaagtcggctatccgtgcgtggtcaagccggtgatgagctcgtctggtcacggccagtcggtggtgcgttccgccgacgccatcgatgccgcttggaccgaagcgcaggagggccgccgcgccgccgatgagggcgatgtgtcgcgcgtgatcgttgaggcgcttgccccgctggagcgtgagctgacggtactgaccgtttcttcgtccgccggcattgtgacgtgcgcgccgatcggccaacgtcaggagtccggcgattaccgcgagtcctggcagccggctaccgagcccgatggtgaggccgagcgggcgcgcgacatcgcacgtaccgccgttgaaggcttggtggccaaggctcaggcgaccggcgaaaccggttggggcgtattcggcgtggagctgttcgtactcaccgacggctcgattctgttcaacgaggtctccccccgtccgcacgataccggtatggtgacgatgacctcccagcgtctgagcgagttcgcgctgcacgcccgcgcgattctcggcctgccgatcacccccgagcatgtggcgctcacgattccggccggctcggtggcggcaagccatgcgattgtggtggccggcgacggtgaggccgagttcaccgatgtggccgctgctctggccgaacccggcacggacctgcgcatttttgccaagcccgaagtgcatggccaccgtcgtatggccgtggcactggccgtcggcgagtccgaagccgacgcccgtgccaaggccggccgtgtggccgatgcgttgacgattaccgtggagtagtccacggcctgatcagctcagcatggcctcaatattgttgccgtccgggtcgtggatgaacgcggcgtaatacgtggggccatagttcgggcgcgggcccggagcgccgttgtcggtaccgccagaggcgagaccggcctcatggaacgccttgacggcggcctcatccttggcgcggaacgccacatgagacggcaccaccgggttgccgtccttcggagactccaaccaaacgctgtcaccatcctcgtcattggcaaagcacacggcggtcgggtacgccactttcttgacgtagcccagcggggccagcagcttctcgtagaaatccgcgtactgtgcggcgtcggaaacaaacaaaccaatatgatcgatcatgacgaacctccttgcaccatttcgtcactcccattatcgtgcgtgcgcggccgtacactcacgttttgtctattgacgaacatctgagtgttcgcgtgcttgcgtagatactgttactccgaacgactatgcgaccggcaatgagtcgattgtcggaccaataccgtccgcctccgccatcccaacagcgtatggccgttcgatgcagcgacgtatgatgcgctggccgcatcgtagcgtcatgccgagtgttgttgtagccctcgattggtacccttttaccgttagttcacccagaaattccactcctgaaaggtgagtcatggagaagctggaaaagctctacgagggcaaggccaagcaactgtacgcaaccgacgatccagaggttctgtgggtcgaatacaagaacaccgccaccgctggcgatggtgaaaagaaggaagacttcaccggcaagggccgcctgaacaacctcatcaccaccatcatcttcgacctgctcaagaagcgcggcatcgacagccacctcatcaagcgagtgaacgacaccggccagctggtgcgcaaggtgaacatgttcccgttggagatcgtgctgcgcaacgtggccgccggccacttctgctcccgtctgggcgtggaggaaggcctgccgctcaaggagccggtgcttgagtacttcctgaagaacgacgatctgcacgatccgttcgtcaacgacgatgacctggtggccctcgacgtatgcactcgcgaggatctcgccgagatcgccccgctggcccgcaagatcaacgaggccctgatcgagatcttcgccaagatcgacgtcaagctggtcgacttcaagatcgaaatgggccgcgccaccgacggcacgctgctgttggccgacgagatcaccccggattcctgccgtctgtgggaccagaaggaccactccggcaaggtcgagcaccttgacaaggacctgttccgccgtggtctcggcagcatcatcccggcctacgaagagatcgaggagcgcctcgccgaactcgccaagtccgaaggcatcgaagtcgccgaataagtcgtttaggtgcaggtagcagaaacatacagctggctcctctctccgaggggagctgtcgccgataggcgactgaggggaggtcaagacgttcaccgccatgacaactcccctcagtcagctccgctgacagctcccctcggagaggggagccaagttcttttaccgcacttcttcaatttttcaatattttcaagaaaggatttccatggtttttcgcgtgtacgtggaaaagaagcccggctttgatgtcgaagcccagcagcttgcgggcgaactgcgcacgatcctcggactgaacggcctcaaggccctgcgcatcgtgaaccgctatgacgtcgaaggcatctcccaagagctgttcgaccagaccgtgcccaccgtgttcagcgagcctcaggtggacaatgtggcctacgacctgcccgacttcgccggcgccaaggtcttcgccaccgagttcctgcccggccagttcgaccagcgcgccgactccgccgccgaatgcatccagctcatctcccagggcgagcgcccgacggtccgttccgccaagctgtacgcgttggaaggcgaactgaccgacgccgacgtggacaccatcaagcattacgtgatcaacccggtcgaggcccgcgaggccagcctggagaccaaggaaaccctgaagacccaggtgccggtgcccggcaaggtcgagaccatcgccggtttcaacgagatggacgccgaagccggccagaagttcatcgacgagcgcggtctggccatggacctggccgacctcgaattctgccagaagtacttcagcgaggagggccgcgaacccaccatcaccgagatcaaggtgatcgacacctactggtccgaccactgccgtcacaccacgttcggcaccgagctggacgaagtgaccatcgatgacgccaccgtcaaggccgccttcgagcgttatctggcgatgcgccacgagctcggccgcgacgccaagcccgtctgcctcatggacatgggcaccatcggcgccaagtggctcaagaagaacggcgtcctgaccggcctcgacgagtccgaggaaatcaacgcctgcaccgtcaaggtcaaggttgacgtgaacggccacgacgaggactggctgttcctgttcaagaacgagacccacaaccaccccaccgaaatcgaaccgtttggtggcgcggccacctgcatcggcggctgcatccgcgatcctctgtccggccgttcctacgtgtatcaggcgatgcgcgtcactggcgccgcggacccgaccgtgccggtctccgagacgctggaaggcaagctcccccagcgcaagctcgtgaccaccgccgccgccggctacagctcctacggcaaccagatcggtctggccaccggtcaggtcgacgagatctaccaccccggctacgtggccaaacgcatggaggtgggtgcggtcgtggccgccactccggccgaccatgtgcgccgcgaaaccccggcccccggcgacaagatcatcctgctgggcggccgcaccggccgtgacggcatcggtggcgccaccggttcgtccaaggcgcataacgtggaatcgctcgaactcgacggcgccgaagtgcagaagggcaacgctccggtggagcgcaagctgcagcgtctattccgccgcggcgatgcctgccgtctgatcaagcgctgcaacgacttcggcgcgggtggcgtgtccgtggcggtcggcgagttggccgacggcctgttcgtggacctcaacaccgtgcccaagaaatacgagggcctggacggcaccgagctggccatctccgaatcccaggagcgcatggccgtggacgtggccgccgaggacgtggacgagttcctgatctacgcccgcgaagagaacctcgaagccacggtgatcgccaccgtgaccgaggacccgcgcatggtgatgacctggaacggcgacaagatcgtgaatctgtcccgtgagttcctggcctccaacggcgcttccaagcaccagaccgtgcatgtcgaggcacagcagtcctacgagaccccgtggggcgagggcacgctggccgagcgtatgaacaagctggtcaccgacatcaacgtggcctccaacaagggcctttcggagcgcttcgactccaccatcggcgcgggcaccgtgctcatgccgttcggcggcaagcgtcagctcaccccgaacatggccatggtcgccaagctgccggtgttcggcgagaccaccaccgcttcggcgatggcgtggggcttcaacccgtacatcatgtccaagaaccagttcaccggcgcctacctgtccgtggtcgagtcgctggccaagctggtcgcggccggcttcgagcatgagaaggcctacctgagcttccaggagtacttcgagaagctgcgcgacgagccggaacgctggggcaagccggcggccgccgtgctcggcgcactgatggcccaagtggacctgggcgccggcgccatcggcggcaaggactccatgtccggttcgttcgaggatctcgacgtgccgccgacgctgatctccttcgccgtggccgtgggcaacatgaagcgcgccacctcccctgaattcaaggacgccaatcaccgtatcgtgcgcatcgcgccgcgctacctggccgacggtctgaccccggacaaggatgcgctgcttgaggtgttctccgtgatcgaggagctcaccgacttccacgatgccctggccgtctctacgccgggctatggcgccaccgccgaagccctgttcaagatgacgctcggcaaccgcatcggcgtgactctgaacgacagcatcgccgtggacgacctgttcaccccggcatatggttcgttcatcgtcgagctggcagacgatgccaagcttccggccgtctccaatttggtcgagatcggcgaaatcggcaccaccacctccgagtacgtgttcaaggccgccggcgagacgctggacctgaacgctgtgcaggaagcttgggagtccggcatcgaatccgtgttcccgtaccgttccaagggcgaggacaagggcgcgaccgtcgagaccatcgacttccacgcgccgaagaagaccgtgtacgtcggctcttccgtggccaagccgcatgtggtgatcccggtgttcccgggcaacaactgcgagtatgattccgccgccgccttcgagcgcgccggcgccgacgtgaccacgctgatcatcaacaacctgacaccggccgccgtcgccgaatccacgcaggcgttggtcgatgagatcaacaagagccagatcgtgatgatcccgggcggcttctccggcggcgacgagccggacggttccgccaagttcatcaccgcgttcttccgcgcgccggccgtcaccgaggccgtgcgtgacctgttgaagaaccgcgacggcctgatgctcggcatctgcaacggcttccaggcgctcgtcaagctgggtctggtgccgtacggcgacatcgtgccgatgaccgacgcctgcccgacgctgaccttcaacaccatcggccgccaccagagccgactggtccgcacgcgcgtggcctccgacctctccccgtggctgtccaagacttcggtcggcgacatccacaccgtggccatctcccacggcgagggccgcttcgtggcctccgacgaggtgctcgcccagctcagggccaacggccagatcgccacgcagtacgtggacgagaccggcacccccggcatggatctggacgtgaacccgaacggctcgctgctcgccatcgagggcatcaccagcccggacggccgcgtgttcggcaagatgggtcactcggagcgttccggcaacggcctgtacgtcaacgtgcccggcaacaagtaccagccgatcttcgaggccggcgtggaatacttcgccgcctgataatcggcgcgtatcgcgtctgatacggcacacagggaaggaactctcgggttccttcccttttttgttcatgccggtcatgggctaaggttggggtgttcgcactaccgaatccgccgctgaaaggacctgtcgtcatgccgatcaacgaggcattgttcgccgcgatgaaggccgccagctacatcaagcccaacgcgggcaagtcgtacaaattgcagcgcgtggcggaagagcttgtcgccaagcaggcacccgccaatccgaaatgccgtgtcgaggacgccttcgcgcctatggcggatggatatgccgtaccattgcgagtgttcacgccgctggtcgcctatggagcgcccctgcccgaagccctggaggaatcttccgccaatggcacgccagtggcctcggcaatatccgcgattctgcccgccgtattacccaaagtcctacccaaaatacccatcaaggaaagcatgtcgagcggcaacaccgacggtatttccggcaatgccaacacggaacttccctcagtcacgccgcgtggcacgatcctgtttttccacggtggcggttggaccacaggcggcatcaacctgtacacgcaggcttgcgcgcatatggccgtacgtctgcaacgccgtgtgatctcggtcgagtaccggctggctcctgaataccgcttccctactgctgttgagaattgctatgaggtagcccggcagctgtttgctggggaattgccgatttctggggtgggtggttctgttgatgttgaccacccccagtcggctgcgccgacagcccccaccggcgggggcgatatatctgcgacaatcccagcaccggatcccgacagcatcgtgctgtttggcgacagcgcgggcggcaatcttgcggccgccgtctcgctcatggcccgcgaccgcggcgagttcatgccgcgcacgcagatgctgctttacccggtggtcggcaacgactacaatcccgagaccagcccgttcgaatcggtgcggaccaacggcaccgactacatcctcaccgcacaggacatggccgactacatcgacatgtaccgttcgtccgtggccgacctgaccaatccgtatttcgcgccgctcaccgcgcatgacctgagcaatcagccgcgcacgctggtgttgtccgccgaatactgcccgctcagagacgaggacgaagcgtacgcccgtcgtctgcaattggtgaacgacaacgtctcctgttaccggattcacgacggcatccacggttatctgctcaacacgtcggccgtagggctggtgtccaccacttaccggatcatcgagcatttcctcgacgacacaccactggtgccggctcccggcaccggcaccaccgccaacgcaccggagggaggcgacgcatggcaagacgtacttggtaccgactagacaacatcggcaagttctactcctcccaggctggccgctcctcgcagaccgtgttccgctattcggccgagctggcggacgacatcgccccggacatcctgcagcacgcgctcgaccatgccatcgcccagttcccgagcttcaacgtgcacctgctcaacggcatgttctggcattacctcgaacagtcggacggccggccgctggtggagccggaacatctgccgatatgctcgcgactgcattacgggcccaaaagcatgctgttccgcgtgagttatttccgcaatcgtgtcaatctcgaggtctcgcacatcatttcggacggtcgcggcgccatcaacctgttcaagtcactgttgcacgcctacatcgccgagcggtacgacgtgccgggcgtgccttcggattacgacggctcggacagcgacaaagccgaaaacagcttcgacaaatactacgagaaagacaaggccggtgccgcgcccggcacgaagatctaccggctggccggccccatcgaccgggacgcgcccacgttcatggaatatcacgtcagcgccagcaaggtgcttggtgcagcgcatcagtgcggagtgagcctcacctcctacctcatcgccgcgatactgtgcgcgattcgcgacgtcatgccctcgcgcgcccgcaatcgcgcgattcgcgtggatattccggtcgacttgcgcgccttcttcaggtcggagaccgtgcgcaacttctacggcatgacttacgtggcgtacacgccggccgatatcgaagccgatgatgactccgcgaaaacttccgcaacgggcccagacgcgaccggcgacggccagcagtccgccgcccgcaccgcgcacggcaacggtatgggtggattgctgaccgatgagccgttggccgacatcgcccgccatgtgcaggagcagctcgaccatgccaccagtcgcgagcgcgtcgaatcgcatatgaaccgcatgattgcgctggaaaagaatccggcgctgcgtctcgcgccctcccctgccaaggactgggtgctggagctggcccggttcatcgccgaccgcgagaccacgaccaccgtctcgaaccttggccgagtcaccttggacgaacgactcgcgcgccatgtgcgttcggtgagcttcctcaccacaccggccagcctgaatttcacggtctgctcgtttggcgacgacctgagcatcggcatctccaccgtctaccatgatctgaacgtcatcaagaacctgtgtcggattctcgccgcgcagggcatcagcggccgtatgaacatcgccggcgcgcatgtggagaaaggagcgtcggcatgaagcattgcgatgcctgcaacgtcgatttcaccggcgatatggcccgttgcccactctgtcagaacgaattgcacggcgaggcctctcccgccgcattccccgcgcagcagatctatctgcgtccgaggcgtttggcggtggagatcatcacgtttgtaaccggcgcgattctgctgctgcatggcttcttcagctatctgttttcgtggccgataccgattgccagtgcatcggcagccgcgctgatcatcagcgtgctgttcatcaacagtgcgattctgcacgcgccgcggccgcttcgcctcatgtttcgatatttctatatcatgctggcgattgcgctggtctggtttgtggcgacgatgaatcatgtcgtcaccatgttcgtcataccgatcacgtgtctggtttcgctggtctttgacgtggtgctgcttatcgtgctgcgggccaaggccattgaccagtacgccaagtatctggcgttcgacatcgtcgccggtctgctgcctctgacgttcattccgctcggctgggctccgtgggatgtgctggtgatggtcagcgggctggtctccctgctggtgctgctcggcctgctcgtcttcgcccgccgtcagctcttctcggaattcggcaaacagttctcggcgtaagttgactgatattgacgtttaatagtgatggcccacaggaagattccctgtgggccatcactatctgttgtgtatggatacgcttaatcgtctacttcatagtggtcgacagatgccttcacctgcgccgcatcggcatcgctaccggtttcgaattttaccttttctcctgcaggccaagcattagtactggcgtatacttcggcagccttcacgccatcggcatcgtatagagccaatatcaagttgacggtaccgaaatcgattccgctgatgttttcgatgacggctgagtatgcgtagtagccatatccgtcatcagttttctcaaaagtcgcagaggcaatcagattattcagcgcgtcttccgtttccgtctttttcttgacggacgaaccgttggcaacaatatcattcaatggatcttgatatttactgtctaccgtgagcttgtaattatcgacaaaatccttgagcaatgccgaacgcttatcgtataccttagtccattcggtgctgtaatccgagctgagataggaataatcctcgttcactttttgtgaatcctcaagcaggttgatataagtaatgactttctcctgcaacttcgaatccttgaactgccgctctttcaaaggctcatcgttatcgatttcagcctgaacagcatctttgacatgcttgacggaatcggtatctttcttctgctcgtactggtcgagaacatccgaacgcttctgatacgcttttgcgattatggacatcgcctcatcatccgcatagtctggaccgtcatccttttgagtgttaccgcagcctgcagcgccaacgatgaacaccaaaaactaacgaccgctgcaagtaccgtcttacccacgtttcgtacataggaaatcataagagtcctctcaattcctcgtttttcctatgacgcgactgcataacctccaagaataaatcagttcccaactgatttttgacgataaataattgaccttgctataccataaaaaagcgctgttactcatgcctcatagcatgagtaacagcgcttggcaacaatgtagactattttttcggctctgttatgtggatattcaccgtatacgagtccatttctgcaatagatgaatacatcttttcaatcaccgtttttgcctgctcattagcattcttcaacaaatcccccttattcagtttcttttccgactgcgttttggcgtctttcaaggcatctgctgtatctgaaacttcattgccgttaaatagtgaagattcttcatcaaagaatctcaatgaatccgggtccaccgaaactgactagatagtaggtgctggcagcgtgatgtcgatggttcgattatgcttattgacatcaatctcagccttactcagatcgacgccggcacgggcctcaaacgtatagaacatcacaaatgatttttttattgaggagagacatggtggtgattaacgcaatttacaaaaagctttacgcgcaagactgtggcagccgactaagtggggtaagaagcttctgaaaatcgcggattccataagctactaagtgacggaagcgagtggacaatgcaaacgcgggagcatgtgttggatactttgaatcatgacggcgcgaaagtctttgccaaggggatgataaggcagggatggaatgctctaggtgagggaatgcataacaccgtagtcggtatccagcattcgttgaagaacagtggcagggcatggaatcgtttcgtctccgaatggcaggatgcgaaacaggccgcgaatgccgctcattctaacccaaacaacacggtgatgagggatttctgggatggtcagttcaagagattcggagattggagcaaaggccatgggtggtccatcggcgacacaattatgaatgcccgaaccgggtataccgattttcggggtatccacgacatgaagaatatcgcggctgtcgacgcccgtcggacggtgtgggacaccatgaattttggtcagcatgttgtgtcgtatgccaacgcgacgtatgacacgttggcatacggcgaaagtggtgaagcctttcgtgaatccgactgcggatggtggtctgcagtggaagcattcgccacaggattatttcaagacgctcgttccggatccagatcagttatggaatttcaagaccatatatcaggcaccgggaaagttgtccgatggggcggctgaggcatctaatgccattcgagttggtatcagtgatctataaaggatggatgattgacgatgagtaagcattctagaaatgatggtcggcaaccggagcaatatgcacgtttatcggagtctccttcggaggatgagtctgatgaggagttccgtcagtttctgcttgctaagggagaccagaacgatcctgcggtcagggatatgttaaagaccattgatagagacaggtatgaacggtctgcggcgaatggtggtccgactctggagtatgagagtcatggcttgttggcgttgacggttcctcatctgcatggtccgcgtccggggcatcgtgcgttcggaatgcgtggcgtggtgttgaagtctttgtggttcctgtctgtttttgtggtgtccgtggtggtgcaggtagtgttcatggatgcggcaaaggcgaatgggtcggatgattggtggccgttggcggccgtccccaatgttggggtgttcgtcattgtgtttgcgtcgatagcgttgtctccgttcatcgtttacgcgattggcagtttgtggcctcgtctgaccgtgcctttcgtgatgttcgcctccttggcgatgcttgcggctggttcgtttgtgggccaggaggttggtcgtaggtggttgtgggaccggtatgtggcgactggcttgttgaagccgggggatttcgtggactggtcgtctgatcgtctgcctgcgcctttggcacaacccgcgtcgggtggttggtgggtgaccggcttggtggccggtgtactgctggtgtcgggttccctgttcctgtaccgggaggatcggcatcgtgggtcgaacattcttcctcgctatatatcgtatggtggcggcgtggttggtctggtcgcggccatcggcatcgcgttgacccgtcatgtgagcggtttcgcgttggtggcggccccgctggttgcgttgttcgtcgggcttctgtggttcccgttggatttggcggctgcctgtttttgtgtggataatcgtcgtgagtcatgtggcgagtggccggccgcgttctggctcaccgccgaggcgttgttcgtcattggcgtgtgtacggcgctgcccatggcgtgacggttggttgtgtgctgggatggtagtgcaaaggagggtgagtggggatgtccattcggttggatgagcgacggtatgccgaggagttgaagcggctggttgcggatttccggatgtggaagaatccgctggttccgttgccggatggcttcgaggacgatctggcgtggagcaatgttgccttccttatactcttcaaaaccaaaatcggtttccttggccgtagtaagatcctgaatcttttccaactgcctggccacaaccgaattggtcagagtcgcctgaggatgcagcatattgtcaactgacctatatccaaataccgcagcaattgcgcaaacgacgactaaaacaccaataagaatggcttgtgccttcactggcaatttcttccaccttttttcattgtaaatccttcttctctttgagggaatatgacattaactgtccgcccccgaactattttcaagaccaaacggcataatatggggcttatgagcgaacatgtggagcatgggtttgggccggtgtgggatggtgagtcccgggctttgattttgggatcgatgccgagtccgaaatcccgagcggcggcgttttactatatgcatccacagaaccggttttggccggtgatgcaggcgctgtttgccaactccgctgatcctactgacgctgtcggcgatttacctgagtcccgtcgtgcgtttgctctgcgccaccacattgcgttatgggatgtcattgcttcttgcgatatcaccggagccagcgatgccagcatccgcaatgccgtgcccaacgacttgacaccaatcttgcgcggcgctccaatcgcccacatcttcgcaaccggcgcgaaatcagcgcaactttaccgcaaacttatcgagccgcgcctgaccgaagccggcatcgccatcggtatgacccaactgccctccaccagcccggccaacgcctcaatgcgtttgccggaccttatcaccgcctatcgcgaagcttttcgagaatacaatatagttgttcgccaaactactaatatatgagtaatttcgcctgtatacgcccaaaatcactcatatattagtagttattgcacggcggtgacgcacagctgaaaccgccattcggcacagcggcagcaggtagaggaaggttgcggcggccaagctcaacgtgggggcgttgatggtggcgagcggcactgcaccggcgatcgaccaaggaatcaacggagcgatctccacggcactgtcttccaaatcgatagcttgcgcggcgcgttcggattcgtcgtcgccgtatagcccgccgcacaactggtgagtgagcatgatggtgagggtttggttgcaggcgagcgccgccgcgcaagtcgcggtaatcatggtggcgccacatgcgccgatgcgatgaccgagcatctcgatgacctgctgcagccgagcaagcatccgcgtctcggcaaaaatgccagcgtaggcggaggagatgcagacagtggccatcacagtgagcatggagaggatgccgccgccgtccaggagtgcggccacctgcggattttgcgcatggtaaccgaaaataagcagccgcaacagttccgcccattccatgtgctgcacgcccacgcatatcgcgaccgaggcggcaatgctggcgagcataagcaggcgaacgtccacacgcagcaacgccaacacgatgaccagtaatgctggaactagggtaagccaatgcaaatcaaaggccgatgagaacaatccgccgatatcggttatgctgcttgtgttggttgaaacagccgctctagccgcaccgaatccggaaccaccgcttgcacacagccactccgccaccgcagccgcaacgtataccacacaactcagcacaaacggcaccgcaccagtgcgcagcatgcaggcaatagtactgaacaggttcgtatgcgtaagctgtttgaccagcaaggcactggtggaaaccggcgaacaacgatcgcccacatagacgcccgcaagaatcgcgccaccgagcatcaccgggttcgcctgcatcgacaatcccagcgacatgcagatggtacccatagtcgccgcactggcgaacgacgacccgaccagcaccgacatcgccgagcacagtagaaacgacagcggaatcaccgtggcggcgtgaattaccgcagtcgaatgggccacgatgaaggcgatggtcccgctggcccgccacagcgaggtcagtacgccgatgagcacgaaggtcaccaccacggtccccgcggaccgtacgctgccggccgcacggctcgccatcgcgtgcagcgagcaccggcgaaccagcccataccccatgaacagcagcacaccaacgaacagcgcgggaataatcgaccagccgagggcgacgctggcaaacagcaccgcacagaacagcaacatcgcgcccgcttccagcatgtgatcctctcctcttccggctacgacctcatctcagatttcatctcatgacccgcagttgcaaacatcaatgctattcgcacgagccatgactcaagataaccccagattctacgacgaacgtatggtactggttattgcgcaatcattatgactggatttagtcaccaccggaaccgcgaacagccaaactaatattgccaacgattccaccatccccaacacgattccagatgaacgcgccattgctccaggcgatctatcttcgttggcgcactgcccgtttttgctgggcaatccgcaggacatcgatggccgcatcggcgagattctgttccgtcgtgccggattcgagccgaaagtcgccgcccgttcggacaacatattgacgctgctggaactatgccattacggcatgggtgcctgcttatgcccggagcggttcctgccagcgctgcttgacggcgaacggctgcgcaccttgcatgtgctggattgcgggccggagaccgaatacgccatccgattcgacgtttcggccacaccataccgctggagcgtcattgatgatttcattcgttgcgcccgcgaagtcaccaccggcgaaggcgtgaacgaccgcggcctgtcccgcaagcatatcttcgagagcattgatcagacactgaagaacatgcagaccgactatctggacatgtacttctgccaccgattcgacgagaccaccgatctgaccgagacgctgcgcgttgtggccaacgagctcggcacgaacctgccggtgctttccatggcgtggatcctgcagcacccggagatcagctgtgtgatcgccggcgcctccaagcccagccagctggagaacaacatgaaggccgcgggctttgtgattccggctgacgcgatggccgaaatcgacaagatcactggcttccaccactttgagcgtcacgtgggctgacggatctgcggcttcctccaacgggagcgattgttaagcgccgaaatcggtatcgccttgggcctcggcctgggcgatggcggtttcggcgttttttgctgtttgctcaatgacctggttgtatccggtcaaggccgcgaacggcatgaactgggcggcccgctggtgacgagacatatgcggatgcttgcgtgattggtggtgtggcaggttgatgatgtcgtcgtatgcatgggtttcttgcagggtcatgcgcgatggcctccgatctgacggttgcgagcctgaccggtggcaccgtcttccatatccatggctttgatgacggcgttgcggccgaatttacgtttcacatccagcaacgcacgctggatatcatgctctcgagccaacgtctgtgcggcggcatcgtccccacaagccggcatacgcccgcttccgtcgccaccggattccgtgctatcacagtcatatcgcatatcgccatcatcaccgaacaaatcaagctgctcatagcgtttgcccgccgccagttctttgggcgtggccacatcatcggcaacaactgtgagtcgacgcaccagcaaccgcgcatccacaatacgctcgtacagcatggtcatcgcctcgcgaatacgtgcggcagacgacgtaaaatcgcccaatccaatcgaccccacggccgacttaggcacccgacgaccgaaacggtcaacggtcaccggcccttgataggtctttgccgcgcgttcggcggcacgcctcatcgcccggtctgcgcatgaatcaagcttcgaagcatcgagactgccaatgtcatagccgaccgccagtgtcagccgattcgtcatcacccccttatcgaccagatcgagggcgagcgcatcggccatctccttggtaatcaggcgggccgtggcatagtcggcgggaccggtgagtacctgaccgctgctgatgctgtgcgcatccggctcataggattggatgtccgcgatctcgcacggctcccagccccacgcatggtcgatgagcagttcggcattcacgccgaacatgcgatacagcaggtcttcgttgtagtaatccgaagcacgacccaccgagcatcgggcgatatcgcccatggtcatcagaccggcgtgctcaagtttcctggcatagccgcgcccaacccgccaaaaatcggtgagcggacgatggctccaaagcagccgacgatatgacatttcattcagttcggccacgcgcacgccgtccttgtcggcgggcatgtgcttggcgacgatatccatggcgactttggccagatacatgttggagccaatgccggcagtggcggtgatgccggtttcatcgagaatttcgcgcacgatggttcgcgccatggcatgcggccccatacccagcgagcgcagatatggcgtgacgtcgatgaacacctcgtcaatcgagtagacatggatgtgctcgggtgcggcgtatttgaggtagatgccatatacctgcccgctgacctccaaatagtgcgccatgcgcggcttggcgatgaccatcgaggctttgagtctcggcgagcgttccaggtcgcgcgcatcgcaggactccccgattaatcggccgccgggagcatggaccgcgcgctcgatgttgactccattcaggcgctgttttacctcgaatagccgcgcacgaccgggaatgccatagttcttcagcgagggtgagaccgccaaacatattgtcttatcggtgcgggtttcatcggccaccaccagatgcgtggtcaacgggtcgagtccgcgcgccgcgcactccaccgaggcatagaaggacttgagatcaatggcaatataggtatgctcgcgttgcgtcgataccgttccgctgcccatcgccatcacctccttaccaccgccggcccgaccagcatatcaatacgatcgaacatttgttcgatacaacacgtctgttcgaagctgccgaagtcgacgcacgcaacgcgcccaagcatgctcttcacccacaccacacgcgcagcggcagagcagcggcatgcatgcgtaccatgggaatatgaagaaaagcattacggcagacagcgattttgcggcgtgggcggcagcccgatcccagaaaacgaatcgatcactggcaggagcccgcctcgcgattccggagccgcagaagcatgccgaaatcaagtctcaggcccagcaatggggcatgaccgtcgaagatgccacgatgaccgacgggcacagcgaggaattcctctgtgacggcacacaaagcattgattccattgccgacatgcgcacggcaagtgggctggaggcaatggagtacgcggaacagcacatgccggtattacgcgacaccatggatgacctcaccacccgcgtcgatttctcaggcattcgtattgccgtctgcctgatactggagccaaaaaccgcgattctgctgcgcaagcttaaggccgccggcgcaatcgtcggcgtatattgcggcccggattccacggatccccgagtggcggaacagctgcgccgagaaggaatcacggtcgaatccagccgagcctggaccgcggaacagacgcacgaggcagccctgcgcctgctggacaagatacagccgaacatcatcatcgacgatggtgccagcttcgcccgtctcgcctcgttcgaacgccccgaactcacggcgaacctcattggagtggccgaggaaacgaccagtggcgtacgcgcgttccagcagatgcaggaagcgggagccctcacctacccggtcgtagccgttaacgacagtgtgctgaaaaccggattcgacaacgcccacggcactggggagacatgcgtgaccaccatgcagcgcattctcggcgagcatgcattcgacggcaagaacgtcaccgtcatcggctacggcccggtcggccaaggcttcgcacggcgtattcgcgcgcttggagccgaagtcaccatctgcgatatcgatccagtggcttcactcaaagcggtgttcgacggcttcgccgcacaagacattgacgaggcactcccttgcgcggatatggtggtgtccgccactggcgtgagacatacagtcacacttgagcacatgcgcgcaatgcacgagggcgcggcgctcgcagtgatcggcggcatcgccaacgaaatcgccttggacgaggtaagcgacttcaccccacaggtcaacagggacaccgcgcaactcaatgttcccgacggaccaacgctcacgctaatcgccgacggcgatggcgtgaactacacggtgggaggcggcaatccaatcgagatcatggatctgagcttcgccgtacaggccagcgccgtcgcatatcttctggaacatcgaggcacactggatcacacgcttatcagacttgacgcagcgaccgaccagcgcatcgccgccagcgcgctcaaggcgcgcggataccgagccagccatgccgtggaggacaacggctacgattggcgactgaccagattcgcggaaaacgaccgagagaacgccgaccgatagccataggcacggcaccgaacacaacgcagcgaggagaatatgaccgacaacacctggccgaccgtcgataccgagcttatcgatgaggtgacactgtattccgccaaactcatcatccccgtgacgggccccgtcatcatcgatggcgcagtcgccatacatggcgaccgcgtggttcatgtaggtaaacgccgctgggtgctggaggcgctgaagcaggaaatgacgtctcacggcaccatccgtgaacggcattgggatggggtgctcacccccggattggtcaacgcgcacactcatctgcagtacagcggcatggtgcaggtcgggcaaggcacctacgatcggttccgcgcctgggaactggcattcaacgaggtgtacgccgaggcgcagaagacccagccatggaagcagtgggccgaggacggtgctcgccagatggtcgaatcgggaacgacggccgccgcagacatcgtcaccgatttggacgccgccggcgcgctggcttcgcagggcatgcacggcatcgcttattgggaggtaatgggctggcacaacgacgaatggatggaaaagggtcgcaccgagctcatccggcagttgcgccggatgaacgaggagcagctgccgaacctcggcatcagcccgcatgctccgtatacgctggagtccgaaccgttcgttgatcttccagacattgctcgtcagctgaacatgcgactgcatatccatctggcggagaccccgctcgaggccggcacttatccgccggtgctcaccacttattcggcgtccgactggcgtgaccacgattgggaaagctaccggcagctcaaggacgtgggcaaaggtgcctccgccatccagttcgtcgatcagcttggctcgcttggcccggatgtgcacattgcacacggcgtgtgggccaatggcgaggatcggcgtattctacgtcagcgcggcgtgggcgtggccttgtgcccccgatcgaatcgcattaccaacaccggcaaagatgcaccggtgcgcgaatacctcgaggaaggcaatctggtaagcgtgggcaccgattcgctctccagcacgccgaccctcgatctgcttgatgacgtgtcgatgctttacggcctggcccgcgaacaaggctatgccagcgacgatctgacacatcgcctgattcgtatgatgacgctgggcggcgccgcctccatgggcatgcacgtgggccgcaaccgcattggacagatcaacgcgggcgcattggctgatttcgcgttcttcgacatccccgtcgacacatcatctccggccggcatcgaagaaacgctggaaacactggtgaagcacggcgcaggcacgaaccgagccacggtgatatccgggcgcgaagcctacaacaacgcctggtgacaccgctgacccgacctgatatcaagaagccaaaaaccagcaaacccgtcaagaacaggagatctcattatgagcgtcgctttgcgagacatgagtccatacgcccggtccatagtggaacgccttggactggaagcccaccccgaaggcggctggtacacgcgtgactggcaatccccgcacacggatgaggcctcaagccgaccgctatcgtcactgatttacttcctgctgcccgagggagatgccagcgcctggcataaggtcgatgcggatgaggtctggctgtggcatggcccggcatcggtcaagctggaactcggcggcagcggcgagactccggaatccgacgaatccaagcgaaccgtaatcaccctgggttccggcatcaccaccgatcaggccgacgtaaccgtatcgggacatgcggtcgtaccggctggcgtctggcagcgcacagtgcctggccagggcgatgcgctggtctcctgtgtggtcagtccgggattcgtattcgacggcttcacactcgaacagtgaacgccatttcgctctgcgccaatatgagatattcgttcgcttacgcgccagattgcgcggctctagccggccataagcaatggagataaccagcatccgagaatatcgctgttttgtagtaacccaatagccatacaattggcgcgcatgcatcaagcacgactttgaaccgtgtgcatgacgaacacttgaggagaggaagcccatgttcaataagcaacacatcgtccgtaccattgcgtccaccgccagcatcctggctctgtcgttcaccgcagcctgcggttccggccagtccaccgcatccaattccgccgattcgaacgacatcacccagcagacgtacaagccgggcaagctgaccatcgccaccggacagccggcctacgagccgtgggttatgaacgacaagccggaaagcggtgagggctacgaggcggccgtcgcctacgcagtggccgacaagctcggtttcaagaagagcgacgtggtgtggacccgcaccgcattcgacaccgccatcgctcccggcgccaaggactgggatctcaacatccagcagttcggcatcaccgacgagcgcaagaaggccgttgacttctcgtccagctactacaacgacagccagtccgtcgtggtcaagaaagacagcaagttcgccaacgccaccaaggtatccgatctgaagaatgcgaccgtgggcgtcatggtcggcacccttgcctacgactacgccaaggcgaacatcaaggacgacatccagacgttcaatgatgatgccgcactggctcaggcacttgacgccggtcaaatcgacgcactggtcaccagcaccgtggaatgcgtgtacatggtgcagtccgagcaggtcaaggatgccaaggtgctcggccgtctgcctgactccgaagacaagagcggcatgggcatcgtgctgccgaaggattccaagctgactgcagccgtgaccaaggcagtggatgacctgaacgccgacggcaccatcaagaagcttcaggacaagtggctggccgagtacaccaccgacctgaccgaactgaagaagtaagtggagtaggctcacatcataaggtcacaacaccttggccgggcgctgcggaaattttcctgtgacacccggccattccggcattcaggaagcgagcgacattcatcacatgaccgcagcaccaaccgaaaccaggcagtacaatgcccctgacggacacgaggtaagtcaggtcgagctcaaacgacgccaatatcgtgttcatcagcaaattcaatcgacgattaccagtctgatcagcaccattgtgttcgttgtggtcatcgtcatcggcctgaagctctcccccggctggccacgagtcaaggagaccttcttctccggcgaatacttcgtcaaatcgtttccccatgtgcttgacggcctatggctcaacatccgcgttctgctcgtcgcagtggtcggcgtggcgattctaagcacgctgatcgcattggtgcgcaccagccgctcccctattctgttcccgctgcgtatcctggcattgatctacacgactgtgatgcgcggcgtgcctattatcgtcgtgctgtatctaatcggtttcggcattcccggcctaggcttgttcggccgtatcgatccctcggtactcggcaccattgcagtggtaatgggatacagcgcctacgtctccgaggtgctgcgtgccggttttaacgacgtacatccttctcagcgagcctcggcccgctcgttgggcctgacctccggccagacgacccgactgatcgtcattcctcaggcattgcgcaaagtcgcgcccgcactgatgaatgacttcatctccatgcaaaaggacgtcggcctgatttccgtgctgggtgcggtggatgccgtgcgcgccgcacagatcgacgtggccagcacctacaacttcacgccgtatgtggtcgccagcctgctgttcatcctgatgagcgtgccgttcatcctgctgaacgactggtacacggaacgtctgcgtaaacgcgaactcagcggaggaacggtatgagcgaaataaccaatatcaacaccgaggcgagtgactcccccgtgagcaacaagacggtgctgcgtcttgatgacgtgcgcaaatcctttggaaacacgcaggtgctgcgtggcatttcctttgacattcaccaacatgaggtggtggctttgctggggccttccggttcgggcaaatccacattgatgaaatgcgtcaacctgcttgagcaggtcgatgacggccggatttggctgggcaataccgatatcaccgacccgcgtgccgatcaggacaagattcgcgcacgtatcggcgtggtgttccagcagttcaacctcttcccccacatgtcggtgctcaagaacgtgacccttgccgcaatcaaggttcaccactggagcaaggatcgcgccgaaacccgcgctatggaactgcttgaacgcatcggcatgcgcgataaagccagcgcctaccctgatcagctctctggcggccagcagcagcgcgtggcgattgcgcgcgcactgatgaccgacccggaactgctgctgcttgacgagatcacatctgctcttgatccgatgctggtcggcgaagtgctcaacatggttgccgagttaaaggcccaaggcaccacaatcctcatggccacgcacgaaatgagcttcgcccacgaagcggccgaccgcatcgtactgctccgtcacggcgtcatcgccgagaacggcacacccgccgaggtgatggacgagtcgcaggatcccgagaccatcgagttcttcagccatttcaggcactgagacgaagccgaaaaacaagcaccggattcatacgacgaaaggccaaaatcctaagccactattcatactcaactgatctggtgcttaaaccgcgtccgagaaccccaacaagttccaccaccccacaacacgcgatgtagccgccgattggtagggttggcagatagttaatcccctgtttgaaaaaggagctttggcttgtcggctgaactcgaagacattcatgaggaatgtggcatcttcggcgtatggggccaccccgacgcctcacgactcacctattttggcctgcacgcgctgcagcatcgcggtcaggaaggtgccggcatcgtctccaacgataacggtcatctcatcggtcatcgcggactcggcctgctcacccaggtgttcggcgatgagcgcgaaatcgaacgactgaagggcaattgcgccatcggccacgtgcgttacgcaacggccggctcgggcaccacggacaacatccagccgttcatcttccgcttccatgacggcgacgtggctctgtgccataacggcaacctgacgaactgcccgtcactgcgccgcaagcttgaagacgaaggcgccatcttccattcgaactccgacaccgaagtgctgatgcacttgattcgccgttcgatgcagcgcacctttatggacaagctcaaggaagcgctcaacacggtgcatggcggtttcgcctacctgctgatgaccgaagacgccatgatcggcgcactcgacccgaacggcttccgcccgctctccctcggcaagatgaagaacggcgcctacgtgctcgcctccgaaacctgcgcactggatgtcgtcggcgccgagctggtgcgcaacattcgtccgggcgaaatcgtggtggtcaacgatcacggctacaagatcgtgcagtacaccaacaacacgcagctggccatctgctcgatggaatacatctacttcgcacgcccggattccgatatctatggcgtcaacgtgcactccgcccgcaagcgcatgggcgcacgtctcgccgccgaatccccggtggaggccgatatggttatcggcgtgccgaactcctcattgtccgccgcatccggctatgcggaagcagcaggtctgcccaacgaaatgggcctaatcaaaaaccagtatgtggcccgcaccttcattcagcccacgcaggaactgcgcgagcagggtgtgcgtatgaagctctctgctgtgcgcagcgtggttaaaggcaagcgcgttatcgttatcgatgattccatcgtgcgcggcaccacgtccaagcgcatcgtgcagctgctcaaggaagccggcgccgctgaagtgcatatgcgcatcagctccccgccgctcaagtacccgtgcttctatggcattgatatctccaccaccaaggaactcatcgcagccaagatgagcgtggaggaaatccgcgaatacatcggcgcggattccttggcctacctttcgctcgacggtctggtcgaatccatcggactgaacgccgacgccccatacggtggcctgtgcgtcgcctacttcaacggcgactaccccactgcgctcgacgactacgaggccgacttcctgaagtccctcacgcccgaggaccgtgtgcgtctgcctgaattcgcgctgtacaagagcaagtacatcggcaacgagtacaacaccgtgcagccggacgtgcagtaggttcggccggtccttcgactacacctcagtcattggtctttacgactacccctcagtcagcttcgctgacagctcccctgacaaggggagcttagtacaaacgaaaatccgctttttgcaggtggctccccggcaagggagcttgaaaatagaacagaaaggccccaccaaatgccaaaagcatatgagaacgccggcgtgagcgtcgaagccgggtacgaagtcgtcaagcgcatcaagtcgcacgtggcccgcacgaaccgtcccggcgtggtcggcggcatcggtggcttcggcggcctgttcgacctagcctccctgggctacaaggagccggtcctcatctccggcaccgacggcgtaggcaccaagctcatggtcgccaagctggccaacaagcacgacaccatcggcatcgactgcgtggccatgtgcgtcaacgacatcgccgcccagggtgccgagccgctgttcttccttgactacatcgcttgcggcaagaacgacccggccctgcttgagcaggtcgtggccggtgtggccgacggctgcgtgcaggccggttccgcactggtcggcggtgagaccgctgaaatgccgggcatgtacgacgaggacgagtacgatctggccggtttctcggtcggcgttgccgaaaagtccaccattgtggacggttccaccatcactgagggcgacgtgcttatcggtctgccttccaccggcgtgcactccaacggcttctccctggtgcgcaaggccctgttcgagcaggctggctataccgtggacactgagctcgccgagctgggcggcgcaaagctcggcgacgtgctgctcacccccaccaagatctacgtcaaggccctctccccgctgttcaaggcgggcgtggtcaagggcgtggcccacatcaccggtggtggcttcatcgagaacatcccgcgcatgattccggacggtctggccgccgagatcgagcttggcacctggcctgtgctcccgatcttcgacgtgcttgagaaggccggcaacatcgatcacaaggagatgtacaacatcttcaacatgggtatcggcatggtgctggccatcgaccccgcccgcaaggacgaggcgctgaagctgctcgccgacaacaacgaacccgcctacgtgctcggccagatcaccaccgacaccaccgacacgcaaatcgtactgaagtagctccagataccggctcccctcaaagaggggagccaaagactttaggaaggaaaaacatgggtcagaaagtattggtcatcggctccggtgcgcgtgagcataccattgcctacacgctgctcaaggcaccgagcattgacgaagtcaccgtggctcccggcaacccgggcatgctcaaggacggtatccacaccacgcagctgagccagtcgaaccacgccgcacttatcgaattcgtgaagaacaatggctatgactgggtgttcgtgggcccggaagtcccgctgatcgaaggcatcgtggacgatttcgccgccgccggcatcaaggcgttcggcccgtccaaggccgccgcccagatcgagggttccaaggacttcgccaagcagctcatggaccgtcacaacattccgaccgccaaatataagacgttcggagacttggacatggctcaggcttacgtacacgagcatggcgcgccgatcgtcatcaaggccgatggtctggccgccggcaagggcgtgaccgtggccatggacgagcacaccgcccagcgtgcgcttgaagacatcttcatcgatcatcgcttcggctccgccggtgccaaggtcgttatcgaggacttccttgacggccaggaattctccctgatgagcttcgtcaacggcactgatttctggccgatgccgatctcccaggatcacaagcgcgcccacgatggcgacgaaggcccgaacaccggtggcatgggtgcctacagcccggtgccgcagattccgcagtccgtggtcgacgaggccatcgagaaaatcgtgcgccccaccgtcgaaggcatggccgaggaaggcacgccgttcaccggcatcctgtacgccggcctgatcgccaccgccgacggaccgaaggtcatcgaattcaacgctcgtttcggcgacccggaaaccgaagtcgtgctcccgaagctcacctccgacctcggtgccggcatctccgccattctcgacggcgaaacccccgaattcatctgggatgagtccaacgccaccctcggcgtggtcatcgcctccaacggctacccggagaacgtcatcaagggtgcccgtgtgcccgagatcgaggtcgacgaggattcgcatgtctactatgccggcgtcgcctccgacgacaagggtggtctgattgccaactccggccgtgtcctgctcgtcgaaacctccgccccggacatcaagtccgctcaggacaaggtctacgcgatcatcgacaagctcgagctgcgcggactgttctaccgccacgacatcggcttcaaagccctgaagtaacagaagcggcgcatctgccgcatatttttggcccggtggccatgtcaatcgattgacgtggctaccgggccagatttttctgtcccggtagctgatttcggctctttttcgcaaaccaggacagttgaacacctcgaatataggaatatttggaattccattccatgcaaaaccgcactattccgccattttcgtaatacgcggacgatactttcggcgtcagttttgtcccggtaagcagaaaatgactcgaaatcaaataccaggacagaaaaatctggcccggtacacgaatcaatcgattgacgtggctgccgggacagcgaacgtcactatgacaacgccatcacccaatatcagcgagcgatatcacgctagctgaatttggcgatgatgttgaacagtttggccttggcttcattgaagggcgggtacacgaggcgcagagtgtcggggaactgcggcttggtaaccacggttttgacgtggctgaaggtgaggaagcctgctttaccgtggtaggcgtcgatgccggacgcgcccacgccaccgaacggcagtcggctggacagcaggtgacccaacggcaacgaatatcccaaagctccggagctggtctgacgttcgaaagtcagccgaacctcgtgatcgcgcgagaacacatatgcagccaacggccgggaccgcttgttgatgaatcggattgcggactcggcatcctcaaccaccaggatcggcagaatcgggccgaagatctcctccttcattaccggcgcatccggtgacgtgccgtatagcacggtaggcgcgatatatcgggcggcgcgatcgaccttgcctccgcaaacgattcgcccggccggatcgaatacgccgggcaccttgtgaatctcgctcggctcaacagcggccgaggcagtcgcatcactatcagcggctgccgtattcgaaccggccgccggcttcgccgcattgttcgcgctaccggtgccaccaccggctgtctcccccgcgcttccgcgtccggcagccgcgacattgaagcgccgcccgaccatatccatggccgcgcctaccgccgatgccacctgtaccagcggcgagctcggctcctcagacggcacggtgccgaccggcaatagcttgcacagtcgttcaaaatgacgatcgttgataatacgaccaaaatcaggcgaggccttcggatcttcgccatagaattcggtgatggctacggcgatgcgctcggccagagcctcggccacatccggcgtggcgagcacatagtcgggtgccacgcaggtctgtccggcattggtgaacttgccccatgcgatacgtcgtgcggccacattgatatccaccgtacggtccacgaagcacggtgatttgccgccgagttccaacgtgaccggtgtcaggtgctcggccgccgcacgcatgacgattttgccgacgtgcccgccgccggtgtagaagatatggttgaacggacatttcagcagttcgccggtttccttgggcccgcctccgaccacgcacacggactcggggtcaagatattgcggcacgagttcggcgatgaggcgcgaggtgttgggcgaaagctcggagggcttcaggcagatggcgttgcctgcggcgagcgcgtcggccattggctccagagccaacagcaccgggtaattccatggcgagatgatgagtaccacgcccttgggctcggcgatcgtccagccggcggcgggttgcagcatccaatgcatcgccttgggatggcgcgcggcccacagtccgagccggttgcggacgaactgcgcctcgccggccaccagattcagctccatcagtatggtttccgccgcgggtttgcccaaatcggccatggccgcagccacgaaagcatcacgattgtccgctaccagacggcatagcgcatccaattgcgcccgtcgccaagccaatggccgcgtacacccggattcgtaggcgtgacgcaactgagcgaaatccgcattgaccatggcacatccttcccgcaggatgcccgggtcggtttccgggcatcgactgtacctatcgtaccgtcatgacgatggcatgagggcgtttgtgctgcaggcaataccagacgtttcggctggtattcgccaaatagcttgggctcggccgaagtaggtggcgcaggtattgtcggcgagttcatcgacggtgatgggattggcgctggccacgccgagcagttcggcattggcaggcaggtcgtgttgtgcggccacagagtccacttgtacctccacatccacagcttcggcagaaggtccgacggcgatatgcccgcctgcatcaaccacaatgcggcggtcatcggtgacatgcacgatggcgtcgcggccctcatagcccgcccatgaccagctggccacgccgtcatgtcctcgttcgatgaatcgcgaggtgcggcccgcgagggtcgcgcgactcgtgaatcatcgcatcgtgcgggagcgtgactggctgccgcgctgccgtatcgcggtccttgccaattgaacggaaccgccagccatgattcacatcgatgcgcttcatggctttattgtaaggcgggagtgattggtctgtgggatctctccctcagtctcacttcgttcgacagctccctcatcagagggagctcacagcactatggcaacggtacagcaattttggacgggcttcgcccgcgttttgctggctcgcctgtcggctcgcacgttgcctacagaccgaaaatcctccggattttccgtcgcggcacagccgctcccctcacctacggatagcccactgagctatccgctttacggttcggccgggctgtctgctttacggcaacatcataaaatctgtgtctttgaggtagtttttgccggcggtgatgtcgtattggatgagcttgtagtcggcaagcaactgcttggtttccttgtcgaagtcatcggtggacatcgggttgccgttttggtcgagatagatgttctggccttcgggaatacgatcccagccttggaccttgttgaccacaggcggttccatagcggcaatcttggaatgcatttcggtcaggaacgccagatacgggctgaccttggcgttcatgtgatcggcggcctgtgccacgaagaagttcggcgaagagtaggctgcatcgcttgccttattgccttgggagctggaagccttattcgaccagatgaagtaatcggtcaggtgcagggccaaggagttgttgccatcctcgctggcggacgagtagatgcccggcaagtgatcgccgtagaacactacggtgacgggcttatccagcgcatccagttcgttcaggaactcctgagtggcctgatcggtaatctccacacccttttgataggtctcaatcgactgctgttcatcatcacccagcggcgtacccgtggtggattcagcggtgtagtcgttgttctcataccactcgtggtagggcatgtggttctgcatggtgatgatctgaatgaacttgttcgtcttgccggacctgatgccttccagcgcagaatcataggaagacttatcagagacgtacggcgactcgtcaatcttgtcctgatacttgatcacgtccggaccggtcagcgtgtagaagtgcgagaacccgaacttcttgtagttcgtagcgcgcgagtacatgctggactcgtacggatggtagccgagcgagttggcgggcgcaccccacatctggttgatggtgggggtccaatgctggctcgggaccagctgctggtacgggctggacagggaggaatcgaaattggccatgctcagaccggaaagtcccatgtattcgaggttggccgtaccgccgccgtagccggaggagagcatcaggccggaggtggtgcccgccttgatcttgcggatgttgggcatcgaatccttattggtcttcagtcccggcacgcggctcgggtcggagaaggattcggacagcacgtacaccactgtcgaatcagtgaggttgttggtgcgggaggcgttgattgtctccgcttccttctggtagcgagcggcgaccttcttcatggtctcctcggagtagttgctcggcttgtccatgatcttcgggttgagctgacgggtaaaggccacgagcggaccgttgcgctgcgcgtcatacacggaatcccacatggatggcgtgtcccccaaggcgcgggagaacttgttggccagcgaatcggtggtgctcacatgaatgcagtacaacgcgaacaccagaatcggcagcagcagcagaatcagacgggaggtgaggttcaggctcaggttgtccgtacggatcatgcgacctttgcgcccgtcgaagtggcgcagcaccagaatcagggcgagcagcgcggcgaacgcgccaagtgccacgaggatggtcacgtgcgcgccggccggaatgaaggtgagcatattgccggtgttcgagccaaggaagccgaggtcggcgggcagaatggcctcgtaacggatctcgaccttgaaatgttcgatggcggccacgatgattccgaccgcaagaatcacgatgcttgccgtccagaatctgttgaacagcatcagcaacatgaggtacagcaacgcgacaagtatcacgttgagtacgaatacgaaattgccgtcggtccacatcttgctcacgaagccgaatccgacggtcggactggacagttgcacacgggtggagctggacgaaacgcccacttcgagcgccgtcacaacaataatgtcgaagataacgaagagcacgccgtacgcccagccggggaagggcttgtgggggtgctggggcgtgacttcattggcttcggcctttttgacccaaagcttgaaatggggtttcactgtggtgatactactagtgttttcgctcattcgcctgtttccgtatgggacttttcaagggcatattgttgccgctgaaccttggaaaatccatagttccactatttttcttaccgtttcctaactattcaccctaacgcaaagggtgcctcgggacatccccgaagcaccctgatatataaggagccttccctgatagcgaagcgttctgttctcccctaggcaacgcctcgctatctgacttgattattccccttattgctgttgcggattgccggctaccgccgcattacttcacggcggcggcgaactggtcgaccagtgcgctcatccagtcgagcaggttggtgtactgcttcggcatctgctcggtgagctccacgatcggcacgttgacgtccttggcggcaccggtgatctggtcggtggtggagttggcttcctggctgttgaagacgagcatcttgatggagccgcccttcagggtgtcctggaagtccttgatgtcggccggggtcggctcgctctcgttggcggaagcctgggcgtagcccttcggggtggcgtcggtcatcttgaggtcgtcggccaagtgccaggccacggattcggtggcggcgtacggcaggttctcggtcttggcggaagtctccttgatcttggactcaagctggtcttccttggcgtgccattctttgttgagcttggcgtagtcgtccttgtgactcgggtcggccttctggtaggcggcggtgatggcgtcggcagcgttggaacgcaccttggcggagaaccagacgtgcgggttgtcgccttccttgatgccggcggtttcggcggcggtgaccagcgtggccttggtcgactgggcggccttggtggcccacgggtcgtaatcggcaccgttgaccacggccaccttggcagtgccgaacttggcaacatcctggctggtgggctcgtaatcgtgcgcctcaacgttggtcttggtcatgatgttggtgacttcgacgttgctgccgccgaggtcttcggccacggaaccccactggttgatggaggcgacgacctcgatcttgccggaagacgcggcgctgctggaatcggacttgttgccggcggcattgctggaaccgcaggcggccatcgagaacagggtcgccgcggcggccgcgatggcgagcgcgcgcttggcgttggacatgatggacatgattggattttcctctctaattcggctgtttggccaggcgatgctgctgttgctgcatcatcgcccggcccccaacacgacagaataacatgtattgagaattattatcatttgcatttacgtcggtgtgttgcacgcgcacacccgcgctgccggcggaaatcccgcaccccgacgatgacaacgcgggatcccgccgttttcggcagacgaaacggcagtatccccgcgtccgaacgatacccgcgcgggggttctgccgtttaaggcctcggaaacgacagaaatcccgcgccaccttcgttcggacgcgggggttctgccgtttgccgcacatgtcacaacggcatcgcggcacagaccgacgcctgcaccaggtcgacgagccccacggtgtgggcatcctcacagaccagtgcatcacgcaaggcgattgcacggatgatgtcgcggcaggcgcactccccgtctgtatccaaatggcgtgccaggcaaccggcaccaatgaccggcaattcgagcacgcacgaggcctcacggatcaggcgggagaccactacgccggtcgaacgctcgtcatagacgccgttctcttcgcccatgccgtacaggcacaaacggtcgtcgtcaaagaatcgctcttcgaattcgtcaaggcctacggcattggccaccgcacccacgaacatcgactcaccccactcgttgagacggaaggaatcggccagatactgcgcgaccggcgtggcctcaaggcccacaggcagcgagaccagaaacgcgccggcccgcccttgcagcgatccgagcgtccgttcaaggtcatgtttgaccgtgcagctcatgcagcacccctcgagcccgaacgaatcggactcgccgaacaccaccccgcttgcctggggcttcgcgacgttgcgcacgatatcgagaccggattccacggcttcgttcgggcgcacgtcataagcaatcgagcatacggacggaaaggaatcgaccaacgagaacgccacggagtccaggctcaggcggtcggcgccggtgagcagcaccacgggcgtgcgcccctccgcgtttccctgtgattgcaatgccggatgaatcatgacagcctttctgatttgataatggttatcattatgatatagttgcaggcatgtccaaaacatgtcaaattctgggaacacgcgccggggtcggcaaccgcgtctcccactcgcacaggaaaacacgccgaaccttcgccccgaacctgcagtccaagcggtactgggtgccgtccttgcagcggcacgtcacgcttaccgtgagcgccaagggcatcaagaccatcgaccgcatcggcatcgaggcggcgatcgcccgcatccgccgcgatcagaacgtcaactgaaccggccacggcatcacccccatgctcgggcagtcagtaggcccgccactgtgccggcgcgtaaccgcgcaacaaaccgcgctaacgagctgcatcacccacatggcaccgcgacgtacgcgacatacgtgacataacagcgtgacacccacacatagaaagcaccactcatggcaagcaaatcctccgcaatccgcccggtcatcaccctgaagtccacggccggcaccggattcacctacaccaccaccaagaatcgtcgtaatacgccggaccgtcttgagctcaccaagttcgatccggtagtccgcaaacgggtgctcttccgagagacccgctaatccatctgttcgttcattggacaccagtcgcgaggcgaggaagaggcttaagcacccgccgaaatcgtttccttgttggcattccggcggtttcctctatcaccatttcatgaactcatcttccgaaccttgcggcatgcgcccaatgaacgaatgcactcgtcccagctccggccggcgcgattcccgcgccccggagccttatcaaggagccggacatggccaaaaccagtaagatcaaccgacaattgcagcgcgaacgcatggtcgccaagtatgccgaacgccgcgccgaacacaagcgcgacagcgtcaaccctcatctgaccaccgaagaacgcgccgaggcgatgcgcaagctgcaggccctcccccgcgacgccagccccacccgtctgcgcaaccgcgattccatcgacggccgcccgcgcgcctacaaccgcaagttcggcctgtcacgtatcaatctgcgtgagaaggcacacaagggcaaactgcccggcgtggtgaaatccagctggtgatcgggccggcacaaccggccgtcaggccgtctcaggccatctcaattcaccggattccacccgcgcgtccgacgccattctcatccatatcaccacacaacaccacacaaccaaaggtccataaccatgcaagagggcatccaccccgaatacggccccgtggtcttctatgaccgctccgccgacaagtacttcctcaccaagtccacactggtggccaaggccgtaaacctgccgaccatcgactgggaggacggcaacacctacccgctcgtcaatgtggaggtgtccagctactgccacccgttctacaccggcaagaatgtggtgatcgacgccgccggtcaggtgcagaagttcaacgctcgttacgggcgcaagtgattcgccgcacattccgcaaagaccgtaagacaagaagaaaggaacggacatgaaggtcaaggcatcggtccgctcattggcccgcaaggatggctcctatgtcgtccgccggcgcggccatctgtatgtaatcaacaagaagaacccccactggaaggcgaggcaaggctgatggcactgcccaagtacaaggcgtcccgagcaaacacgcattcgcaccgagccaactggaaggccaaggtgcctcagctggccacggtcagaacgcctgaaggcgaagtggttcaggttccgcagaatctggccgcagctgtacgaaaggggtatatgaagccataaccaacatcgtggattccgcaatccatcaagtctcgtaacaacaactcgacggtccgctccacaggccggcggcgtacgttctttctcccatttccttccgtatgccgtcacctgccggggcgaaccgccgttttatgaggccaccgcatccgatctggccaagctcgccaaggcagacatcgtggtgctcaacggcgccggctacgacggctgggcggaaaaggcgcagcttgacaagaaacgccagaccatcgtgaacgtgggcggcctcatgggcgtcaccgccaccgacgagcacgagcattcccacgaccacgccgagggcgaagaaggccgacatcaccaccatggtgctacgaacccgcacctgtggttcagcccggaagccgtgctgaaggccgccgaagccatcaacgccgtctacgcggacaaggccggggccggttctgccaccgccgccaccgtgcaacgtcacttcaacgacaggaagaaaccctcaaggaaatggacaactggcccacgtattacccggcatccatgagcaaggaggaagtggccaccgagatgctggcccaccgattcgccatcggcccaggcaaccatgtgcaaagttccccgcatatcgatgtgtaccatcggtatgcggggaactcgcatattatctcgaccactatcatgcgtacggtgctaatatgacggcgatatggcaggtgatattcgcatgaaagaacctcgcacgcagcgcacggaacaggtgaacaccgcgcaacaggaccattcggcgaactatctgtttctgattatcggcacgccgctggtggcgttcctgattgcggcttccgcgatgctcgagtcgcgtgggtttccggttccgctggtgcgtatcggcaccggtgccgaggggcttatcctgcaggcgattccgttcatgctgctgggcgcgatgatgtcggccgcggtcagcacgttcgtcagcaccgattctctggcccgccacataccgaaatcgttggccggcggactggccgcggcattggcggccggcctgtgcctaccggtgtgcgattgcatggtggtgcccacgttcgcgaatctgatgcgcaaacgcctgccgctgccgtgtgcggtgacgtttctgtgcgcggtgccggtgatgaacccgatggcgatatggtccacatggttcgcattcaccgacaaaccatggatggtggcggcccgcatggggttgggcatggtagtggcgatagtcgcgggggtgtcgttcgcggtgtggccgctccgctcccctgcggtgcgtgagaggccgctgacgattgggcggtcgttgatttgcgaggattgtgcaggggcgacgggtgattcgcctgagagccacccccagtcggctttgccgacagcccccgccggcgggggcacggggcgcggattggagcggttcacgcatttcattcggcatacgcatgacgactttatgcggatgatgccgattctgctgttcggcacgatcattgcctccatcatgcgcaccgcattgtcgtcgttgaccaacggttcaagcacgctcgatgacgctggtgccatcgtactgattctggcggcgatgggactggcgttcctgtgttcgctgtgctctacttccgatgcggtgatcgccgccagcatgattggcgcgctgccggtctccgccatgcttgccttcctggtcttcggcccgatgctcgacctcaagaacacgctgatgctggccacggaatgccggccacggttcatcatccggttcatcgcgaccgtggcggcggcctgcttcctcgccgcgattgccgcccatctggtgatgggagcgtagccatgaagcgcaaagtcacactccccgaccgcgtggaggcgctgtgtttcgcggcgctgggcgcggccatcgcctatgcggcggtgggcggatcatacaccacgctgaccacgccgcgctcgctgccgtatctcatcatcggtgcggtactgctgttcgtgctggcgaccgcagcatggctcggactgttccacgccacggagcgttcggttttacggttcctgatcgccttgattattccggcgctgctgatcgtcgtgccgttccagcccagcagcggcagcggcggcttcgacgagtacgccggcggccgcgctatcgccattccccgcagctcgcacaagcctgatggcacctcgcagctgcacggactcgacacgacgaacaagaccctgaccatcagcgacgacgaattcggctcatggttcgagcagatcgaccataatccgcagcgttacgtcggttaccatgtgcaggtcaccgggtttgtgagcaagtcgcgtacgttcggcgcggacgagttcgagctgtcccgccagttcatgtcctgctgcattctcgacatgaccccattcgggttcatagccagctccggcaaggccggcaccccgcacaatcacgactgggtcaccgtcgacgccgtcatcaagcagggcgcctacggctccgccggccacgagcgccaaggcctgatactgcaggtccggtcggccagcaaagccgcagccgccccgaccggctacttctactggcagtaaatgacgcgtctcccgaaatggaaagcactgcgctgcgccatgactcgccccatatcggcagaaatcccgcgttacaacgaaaggtacgcgggggctctgcctttatagggctcaaaactggcagaaatcccgcgcaggcctcgttgaaacgcgggatttctgccagttgattcaaatcatgtgacaacatgccgggcatctgattttctttaataacgataatgaatatcatttgttaacagaaaggggcagaacgtcatgagcatcgagcaaaccgcgaccactcggcgcgtgacgcgaccccgactcctcatcacccaggtcctggcggaactatcccgattcgccacggcccaggaaatcaccgacatcctgcgcgagcgcggcacgcgcatcggcacggccaccgcctaccgcaatgtgcagatgatggcctcccaaggcgagctcgacgtaatccacgtcaacggcgaggccctctaccgcgagtgctcggaccagcatcaccaccatcacatcgtatgccacgaatgcgggcggaccatcgaaatcgaaattcccggacttgagcagtggatcgacaaagccaccaagcagttgaagtaccagaccatcgcccacgaactggagattttcgacctgtgccccaagtgtgcggcgaagcatgccatcgaaccgcctctcagcgtcggcacctcaccaaaggatggaccactgacgacgccagacgatactggccgtcggcgctcgaacaaataatggcgcagtcccgacgctactggccttcagcatcggtgcccttccaatccttggcgcaatagcgacgatataagctccactcgcatcgttagattgccaacgcttggcgcagcaccgacgccagacacgctcatcgtcgtcgttccaccaatatttggattggtaccgccaccacctataccaggcgtcgacactcggccaacaatcggcccgttaccgacacaaaactgcatgaggtctcattgctcttaatagcagcgatgggcctgataatcactttcacccactttcgccgctgccgtctgccgccctacagtcgcagacgaacaaacgctgaaaggaacaacaatgactatcaagaccatcgatgagcatgcttacgagatcgttaccgaagagggcaccttcgccgtctgcaaggacacgctggccaagttcgacgccaccaagcacgagcacggcgtggccgcctgtggccgctgcggctgctgcttcaccggcgactgctgcgacgacaccggctgcgagcacaaccacaccgaagagtgcgggggcaaggcttgcctgcacgcttgccacgagaaccgcgaaggccacgagtgcgccttctgccaccttgccttcgacaccaacgagaagtgccacgatgagatcctggccgacctcaaggaactcaaggccgagctggctgtctgagttttaggtttccgatttctcctgcggattgactcctctcagggaggggagccagattccgacacgaaccaccgcgcttaccgtatgatgtctacgggcgcggtggttttgtttttctcgataatggcgcagatttgctcgggcgcctccttgcagccgcgccggacccatagccagataatcgatgagacggcggagaccagaatttccagcgcataggcgcgcggaatgccgccgtagctcagctcggcacccacacgggccgcctgcccaagcagcatctgcttcaacacatccttgacccggtcatacatctgcatatcgttgcccgaacgggacagtgcgtcgaagaacgcatactcacgcttgacatagcgcaacgcctcggcttcgtgttccagtcctacaatctggtggccaacctcacggccaaggagaacgtggagctcgcctccgaaatcatgaaagacgcgcaggaaccgacccaagcgcttatcggcgtggggcttcaggaccgtatcaacaacttccccgcgcagctttcggcccggacatgcaaataaccggcaccgacttctttaatcagaacaatctcgctgacataaccgtcatcagcgattatggcctgaccaaagctgacgaaaacattattcgcagcgcgccgaagtggccaaggcgatgaggggcggggccgtctccgagtccgcgccgatctactacgaggagatgtcgaaagtggccggcaaggagaacgacaaacagtcgattaccctgatcgccactgatgacgcctacaatttcggcgactacatcaccctgcgttcgcgcaccgggcacaagccgcaggtgctcaccgaccgtggtgcgatcatctccgaacgtatggcggggatgatggacgccaaggtaggcgacacgattaccgtcaccgattcgagcggtaccgagcgcaaggtgcgcgtggacggcatcaccgaaatgcatatcgggcatttcatgttcatgacttcgggtggctataagcacgtgttcggcgaacagtaccagtcgaacgcctatatggtgaggctcaagaaccatgagacctccaatgtggagtcgcgtagcgccaagctcataaagttggacggcgcgaagggcattgtgcagaacacgacttcgaagaaacaggtggccacaatcgtcgacttgccggatcagatcatggaagtgctgattctcgcggctgagctgctggccgtggtgatcctctacaatctgacgaatctcaacgtctccgaacgtatccgcgaactgccgaccatcaaggtgctcggcggactcggcgtgctggtctaccggcggttgaagacggtcgacatgctcggcgccctgaagtcggtggaatagcagcggaatagcaaatgggatcggctttgaagccgatcccattcaattattcgctcactgctttctgagccttctgcgctttctgctccttttggcaatcagggcatagtccgaagacctccagggtgtgggattcgacggtgaagccgtggccgtcggccactttgcgcagccaagcctcgctgggcggatcgatttccacggttttgccgcaccgcttgcacaccaagtggtggtgatgtccgtcgtcgccgcataggcggaacagctgctggccgtccaggcggatcgtgtcggcggcaccggcatcggccaaggcgttgagctggcggtacacggtggccaagccgattttcgagccttcgtcctccagcctgcggtgcaggtcctgagcggagatgaactcctcacagtcggccaaggcggcgcgaatcgcgtccttctgcttggtctggcgttcgatatgttcaaccatcgataaggtcacgccttctttttcaggtcgtcccagcagccggtggcctcaaggtcagcaaccgtggcatcagggttgtcggtgagcacggtgatgtggcccatcttgcggtcgtggcgcacttcggccttgccgtagtcgtgcacattccactccgggtgggtggcgatcagcgcgcgcgtcggctccacatgctggccgagtacgttgaccatcacggccggcgagagcagcttgggcttgggcatgggccagccggcgatgccgcggatgtgggcgtcgaactggtccatcgagcaggcctcgatggtgtagtggccggagttgtgcgggcgcggggcgagctcgttgacgatgacctgatcgtccttggtgatgaacagttcgatggccagcgtgccagccagttcgaagcccttggccaagcgaatcgccagttcatgcgcttcgcgagccacatgttcggacacttcggcgggggcgatggtcatgtgcaggatgttgttgcggtgctcgttacgcacgatggggaaggtgacgaagtccttgccgttgccggagaccaggatcgaagcctcgaatgcgaagtcgacgaagccttccaggatgctcggcgggaagccgccaccacggtcggaacgggagcggattttctccaagtcggcgtcggaacgcagcacgagctgaccgtggccgtcgtagccgccggacacggtcttcagcacggccggataatgaatatcatccaatgcggcgtcaagctcatcgaagttgttgacggcgcgccacggtgcggtggcggtgccgtggtcgttgatgaaccgcttctcatgcacgcggtgctgggtcacgcgcagcaggtcggtgccctgcggggtggcggtgatgccgcgcacctcgtcgatggcatcggcgtccacgttctcgaactcgtaggtgagcacgtcggactgcacggccagatcatggatggcggttttgtcatcgtattcggcggtgatctggaagtcggccacctgaccggtcgggcagttcggcgtcgggtcaagcacgccgacgcggaagcccatgtagcgggcggacaaagccatcatgcggccgagctggccgccgccgatgatgccgatggtcgatcccggcatcagcatcgaaacacgaccgcctgtttcctcagacaagctgggcattggattcagccaccttttctttcagttcgttacggtaatcctcaagcttgtcggccagttcgggctcgaaggcggagagcatctgcacggcgagcaggccggcgttggtggcaccggagttgccgacggcggtggtggccaccggaatgccgccgggcatctgcacgatggacagcagcgaatcccagccggacagggcgtgggagcgcacgggcacgccgattacgggcagtgtggtctgcgcggcgatcatgcccggcaggtgggcggcaccgccggcaccggcgataatgaccttcaggccattggcgcgggcgttgtgcgcgaactcggccatgagctcgggcgtgcggtgcgcggagatgacctgcttgtggtaggcgacgccgaactggtcgagaatatcgcaggcgcgcttcatggtctcccagtcgctggaggatcccatgaccactgcgacttcgggcttggattcatttgccattatcatttactccctagttattgagaataaggcccactgtactcctgatagcggagttaagccacgcagcgaatcgttctcaatacataattctgtgaggcttacagctcaataacgatcttgccgaacatgtcgccggcgatcattctggcgaacgcctcgggggcggcgtccaacccgctgaccacggaatcgatcaccggatgcaggtcggcgtgctccacgaagcgcagcagccgggcgaaatcctcgcgcgaacccatggtgcagccctgcacgcgaatgtcctggaagaacagtcgcgtgagctccgcaccgggctggtcgccggtggtggcgccgcagatggcgatggtgccgccgggacgcaccgaccgcaccgaatggccccatgtggccgcccccacggactcgatcaccgcatcgaccttgcgcggcaaccgcgcaccggtctccagcgcggcgttcgcgccaagtttcagcgctttggcgcgcttgtccgcgtcacgcgaggtgacgaacacttccagaccggcggcatgggcgagctggatggccgcagtggacacgccgccgcccgcgccctggatgagcacggagtcgcccggcttgatgccggcggcatcgaacaacagcgagtaggcggtcagccagctggtgccgagtgcggccgcctcggccgtggtgaggtttgcgggcttggcgaacacgttggcggacggcacggaagtcttctcggccatcgtgccggggtatttctcggagaggatcgtacggcgctcgcccggggccacgcccgccccatcggtgccgacgaacgtgtacagcaccacttcgctgccggccttgagcccatgcttgccgaggatgtcctcgtccagaatgcccacggcatcggtgcccaggatcatcggcgtctgttcggcggcgagacccacaccctgtagcgaccagacgtcgtgatggtttacggtcaccgcgcgcaccgaaacggtcgaccagaacgggcgggcctggggttcgggctgctcgcccaccgccaacgcggcaagcggatcgtcatggttgacggtggatgcgtatacggccttcattgcgcgctccttggtatcaaaaggaattaccgcattcattgtcccacatcgcgcagcgaacgaatcacccatttacggagatgttgggggcattgattcgtcatgtggacctcggacaatgccgggcgttagcattcaacttcggaaagactagcgaagggagattcgagggtatgcgcaacgggtcaggaaacggatttgattcaagcgattccttcgccgtctccggtgctgccgagggggccgcgcgccttcacgacatccccccgagcattaccccttcccatggcgacgactcccatctgctgagccgcattgccagcccggccgatgtcaaggcccttgctcccaacgagctcgccgaactctgccgtgagattcgcgccacgctgctggcatatggccaccaacacggcggtcatatcggctccaatctgggcatggtggaggccacggtggccctgcatcgcgtattcgattcgccgcgtgaccgtatcgtgttcgatgtatcccaccaaagctacgtgcataagatgcttacaggacgggccggcgcgtatatggatccgaaccgtttcggcgaggtgaccggcttcaccaaccccgacgaaagcgaacacgaccagttcgtgctcgggcacaccggcacttcgatctccttggcctgcggcctggcgaaaacccgcgacatggaggggccgggcagcggcatcggcaatgtggtcgccgtgatcggggacggttcgctcagttctggcgtggcgttcgagggactgaacaacgcggccgagcaaggcggcaacctcatcatcgtgttcaacgacaacgagatgtcgatcgccggcgatttcggcggcatgtacggcccgctcgcccgtctgcgcgcatccggcggcaccgcccagccgaacctgttcaacgcgtttggcttggattatcggtatgtggaggccggcaacgatgtttccgcgctggtcgcggctttcgaggaagtgcgcgatatcgaccatccggtggtggtccatatccacacgctgaagggcgcgggatatgacagtgaggagactcacgccaatcaacaaaacgcctcgaccttaccggtctcactcgactcccccaccggcgtgcaccccaccgataacgtgaaccacagcgaaccgtggcattcggatcactgcaacctgtccgaccatgaaccgcatgagggccagtgcgaggcctcgcactggcagaatccggatgccgcaatcggcaagccggacgatccgcgcaagcattacggcaaaatggcgatggcggccctcgagtcccggttcgccgacgaaccggggctggtggtcatctcccccgccacgccgggctccaacggcatcacccacgaattccgcgaacgcgcgggttcgcattacgtggacacgggcatcaccgaatcgcatgccgtggcgtatgccgccggcatcgcacgggcgggtggcacgccggtggtggccaccacggcgtccttcttccagcgcgcgtacgaccagttcttccaggagatgagcctgaaccgttcgcgagtcacggtacttgattttctgggcggcttgtccggttcggacaatacgcattccggcgcatatgacgtgacgatgttctccaatattccaggggttacgatgctggtgccgacttcggctcgcgactatctggctgatttggcatgggctaccgcgccggccggttcggcggacgcccctgctggtccgacggtgattcgggtgccgggcgaggcgattctggcggcggaacgggatgcgacgctgctgccggtgacgggtgggcagattgctgaccgcccccagtcagcttcgctgccagcctccgccagctccgccagcgggggcatatctgccgcaacagtccgcgggaccgttagcgtaacggctcagcatgccggtgcgcgtcacatgctggattggcgggtcaatcagacgggctcgcaagtcgcgatcatcggactgggcaatgcgtatccgttggcggagcagacggccgccgcattgtctgacgattatggcatcacggcaacggttatcgacccgcgccagtgcacgtcgctggattcagacgtactggagtcgttgcgtgatggccaccagcaggtcatcacccttgaagacgggcagcttgaaggcggctggggcgagaaagtgaccgcatactatgcgaatcatcatgtctcggacggcagccgtaatcctcgtgtgctgaacttcggcgcagccaaggaatttaccgaccgcgtgtcgctgggcgaactgaacgaacgttatggactaacggtggagcaggtgacagaggcgatcactcgttgtttttgatggcgtctagggccgggattttaacggctttattggccgggccgaagccgaacagcaagccgatcagcgtggaaaacagcacggcgaacaggaacagccaccacggaatcaccgaataacgggtcacattctcgccaccaactatcgcctgccagagtatggtccagatagatgttccgccaccggtaccgtcgccggagcccccgccggcaccgctgaccataccgccagacatgccgccgctcatgccgccgctcatgccgcccgcatacaacgcgccgacaacgttgatgcccagcgatatcagtccgctcagcacgcagccgatcaatccgccgaagaatccgatcgcgccggcctccgcaagaaacatgacgcgaatgtcacgaacgtagcagccaagcgccttcataatgccgatctcgcgcgtgcgctcggttacggacataaccattgtgttggcgatgccgatggccgcaaccaacagcgaaaccgcaccgataccgcccagaatcagctgaatcgcgcgcgactgttcttccaacgacttacgcatgtcttcataggaggaggtctcgtagcccaacgctttgatctgtgattcgacttcgggcacggacttgaggtcggcggccttgaccagcacttgatcataggcggtggcttttttggcggcggctggatcgactttggcggccagttccttcaacgcctgcaaatccatgaccagaccgtcggaggtggcatagcccttgttgtagtcgcccgccacaatgccggaagcccgcacatcgagggtgacgttttccgactgacccgcggcgctgccgcttgcgccgcccgcgccgcctgtgccgccgccaccgccgccgtacatgttcatgctgtactggtcgccctgataattggtgccggtggtcagactaatttgcgtggtgagcgggtcgaagaacggatcttcgtcctgatcttcctcgcactggccggtggcctggttaaacgtgcatgaggaatactgaccgccacgtgtgctggtgcgttgttcgccgttcttcagggtgtccatgaaaccataggcgaaccattcgccggcaagcacctggtcttttttgaccggtttctcgccaccgacgagcttgtagcccatctggtcgagctgggtcatgtcgatgcccatgatctgcacgtaatcatagatgtaacggccgcccgcgccggctctggccgtcacgttataagggaagttcatcatcggcgtcacgccggatacgccgctcatcgcgcggaaggattccacggccttgtcgtcgagcttggtatcgcccatcttggacgagccgccatcgtccatcggaccggcataaccgttggtgtacacggtgacgatggacagatcgcccatcgatttgagcatcttctcgttctgctcgttaatgccttggcccaaagagaccatgagcacaatcgagcagcagccgacgataacgcccagcacggtcagaatcgtacgggatttacgccgccataggttttgtctgcagagccgcagtatgtcgccgaatcgcatggtcgggcctttcaggccttgtgggatgagccggctggtgcgactgatgaggctggggtgactggtgtgataggagcggtgtctgccgcagcaccatccgtcacgccggtatcggtcttatcatccttgccttcggaccaatcatcccagtcctcatcaatatcgttcttcttggccttctgcttgcgccggcgacgcaccagcagcacaatcaccacgataatgaccacggcgatcacgacgatgaccacatacaccagcaccggcaatccctgattggcgttctggtccatgttcggatcggccatgccggaatcatccatcggctgcatatcggttacgggtatggtgagcgggaattccttggtcttggtctgtccgtcggaatcctcgtacgtgactttgagcgtggtcttcagctcgcctgacgcgtgcggtgtgaaggcgtaaccaatcgtgccggtggcgccggaagccacattgcccacgtactgggttttcatcgtggcatcgaaaccttcgccctccatcgtggcctcgacgttggcgatatcgcctttgcccttgttcacatattccatcgtgaccgtgttttcctggccggcgatcacctggtcgggcactacgggatcactgatttcgaaccggtcaggctgactgatcggcacggaaatcttgacgtcagactggcttgaggagcgggcgctggcgtccacatactcgtatcggaagttcacggtcacggactgggcaccgcttttcgcggaggcgagcgcctgcatcggcacgctttgcgtcatggcgtaaccggcccacagcgcgtcgacgtagaacgtgttcgtgcctcccgcgatggcgaagctctcgccgccgtccacggtgacgaccatgttcgtcaccgccacctgccccttgttctggaaggtgaagtcgagattgaatttggatccggcggccacggaatcacctccatacgcgaagttggtgatgatgatgttgggcaccggtccggcgatcggcgcggaatcgccgtcgcttccctgagacgtactgttcgtgccgcttgtgccgtctgtgccgtcgaccgcgtacgcctgatgcggaagggagatgacggcaagtgccagtgacagcgtggaaagcaacgcgacgatgatggcgatggtgtggtgggagaggtgcttcatcggtcagttccttgggttctatgggcggacggcgtggacggtgtagttggtgtggttggggcggacggcgtggacggaacagttgggcgggaaaggtcggtgttgagccgatcgctggtgatgcggccatcgagcaaggtgacaatgcggtcggcgtatgaggccatctgcggatcgtgtgtgaccagcacgatggtctggttgaagtcatgggcgaatgcgcagatcatcgtcatgacctcggttttggttttggagtcaaggttgccggtcggctcatcggcgaacaccacctcgggcttggtcacaaacgcccgggcgatgccgacgcgctgctgttggccgcccgacatctggcgcgggtaatggctgagacgatggccgagcccgactcgtttgagtacgccacgcgccgcacgttcgcgctgttccttgggcacgccgcggaacatcagcggcattgccacgttttcgagcgcggtcagattgggtagcaggttgtacgactggaatacgaagccgagatgcttctggcggaaggccgccagctcacgctcgtcgagtttgctgacgggtacgccgccgatgcgcacgccgccgcgcgtcggtttttccatgccggccaactggttgagcagcgtggatttgccggagccggattcgccgaaaatgcagcagatctggccttgcgggatactgagattgacacggtcaagcgccaccaccgtctcatcctcgacggggtattccttgcgtaggtttcttacctcgatgattgctcgcggcacgggcccttcttccttcgttcgtcgccattggcggacgcgcgatagctggttattattcagcacatctcaagtcagagtatagccgttatgcaggagccgcaccccttaagggtgttcccggatggcagtgataagcatataaccgctgatctcaaggtcgacagttcaggctccagacggacccagaccggcataatactcaaaagcccctggcccccacagacgatgagggaccaagggtttattgcatcgtgaccccggacgggctcgaaccgtcgaccttgagattagaagtcacatgctctatccagctgagctacggggccaaactcatgtaagtctagccgtaggggtgtaaaacacctcggcgtaacgtcggcttgcaccggtaccatcggcgatatggggacaacggagagcaacgtagatcacgccgcatcgggccagaccgtcgcaggcgatagtggtgagctcactttcacatacgcacagggtcgttttgccagtgaaggcagggattgggaaagcccggttgtgaccaacatggctgcatccgtctctgccgatgccggcaatgcccccgccggcagcatcaccaacaccggcgccaacaacaccttcaccagcgccaccgaatcgtcgcttgccaccctgctgtccaaccaatgcccgttcgttatcaaggccaccattttcgagggcaatggcaaaaacgccattcgcgaacgtcacacattcaccggctcggtgctgcgccagctcgaccaagccagcgccctgctgaacggtatcaacgaatccggccaatacccggccatagccctgcgcgaagcattggtcaacgcactggaacatcgcgattacacgtactccggccccacactgatcaatatcttcgattcccgcctggagatcgtgtcgctcggcggcctgaccgatggtttggaaatcaacgatctgctcaacggcgtatgccagccacgcaccccgcgtttggctgaattgttcgccgatttgggcctctgcgagaactgcggtaccggtatccaacgcattatggacgcctacgcgcagagcgcggtcagtccgcaactgcgcgtaggccccacttcggtggcgatggtgctgcccatcccggtctcggccgaggccgcatccttgcatcggaccgataccgatgcttccgccgcgcccagcaccactgacgaagcgcagcgcgccaaaatgtattcattccccacgattcagcgcatgacggataacgccgcagatgctttggccggcgcacgcatcatcggctgcgcgccattgcagacgctgattctcggcagtggattcggcgagcgcccggacggtgacgaccaggtcagtacccgcccgctcgatacagcgacgctggaaccgtcgcctcaaacgttggagcagttcacgctcaatttcctcgcgttccgcggcgtgaagctcagccgtaaaaccatgcagaaagcgcttggcctgaacaaggatcagatgacgcagctcttggaccagctggagttgagcggcaagatcgaacgtcatacgcacgccaagtccactacgtattcgctggcacatgcctcaggacggtaacgaccagggcggcaacaaagcggcaacgaccagagcaatacagcccaaggcacgataaagcagcagctcagttctcgaatacgcgatcgcgaatcatgcgaccggattcgtcgagcgcggtggagaaacggccgtagtcggacagaatcacgcccatgtacagcatgtccacgagcgcggtatcggccacgcgcgagaaaatcgcattgccatagatcgtgtgcgagtcacgacccgtcagcaacgtcacgtcggcccagctggccagcggcgcgccgatggcattggttatggcgatggttttcgcgccatgcgatttcgccaatcgcaacgctttgaccgtatccgccgaactgcccgaatgggagaaggcgacggccacagcgccgtggggcaggtgcccggcaccgatctgctgcaggtaagcgtcggtattgagacggcatgtcagtcccaggtagccgagcttggtgaacagatccatcgccggtgtcaacgagttctccacgccgaaaatatcgatgaactccgattcggcgagtagggcgaccgccttgcgataggccttggggtccaacgcactgtgcagctcatcgatcagcgccttcgcgacataggccgctttgccgggaatctcatcttcgccatcccacggattcagatcgaatccagccaacggattgaaggtcactttgtgctcggcggacggatggcgcaacacgtaccgcagttcacggtaaccgccgaaaccgagcttgcgggcgaaacgaatcaccgtcggctggctgacgtgggcgatgtcggccatctggccgacggtcaggtcggccgcctcctcgatatgatcccgaatatactgggccacggcgcgctccgccggacgcagcgacggatacacgtggtcgatgcgctcacgtattcccaccgaggattgcacagccgcgctcctagtcgtccgtattttccattcctgtttcgagggtaccggctgtataccggcgaacagtcgacttggattgaccgcaacatgaacggtgagcgaactcttccgtttacctttccgctccattccctctacaatcaaaaccatggtgcggattagcgtgggaagccccacccatcacacaagcgggcggctgtacggcgtgttcttcgaggacatcaaccatggtgcggatggcgggctgaacgccaacatggtgaacaactacagttttgacggcgtctatctcgaccatcacacgtggcgtatggccggcgccgaacgatggcgtacacaggccgattccctgcgtttctgggatttcatcaactgttccgccgccagcctcggcagtgagatacgcgggattcacggccagcgggtgaccaccgactgccccgccccgccaattcacgcacatagccgatacgctcgcatcacgtccgatgttccttccgaaaccggccctgcatatctggaaaacctcggctataacggaggcggcgacaacgggggcgagcccgcgttctccatcgtcgccgaccacacctattccgtcagtctcgcggtacgtccggttcatgggcgggccaagctgtccgtcggcgtggtcgataggtacggtctgccgctcaccagcaccactcgattgtcgtatatcgtggacgcagatccgcttgacgatacggaagagaccggtctgaggcaggacgatggtgccaatgcgcaggattccggcgtttcgatcagtccggattcgtcggatggtgccatcgccatcggccgtgacggctggtaccggttcaacgccgacgtaaccggcctgaacaccgattacggcaagctgcgtatcaccattgacgccggcgaacgcaccacgttcgatctggatctggtgcagttcatggatgcggactattggggcgcgggcgacccgaaatggcgttacggcaagctgcgccgcgatctggtggaaaccattcaggcgttgcatccagcgtttctgcgattccccggcggctgcatcgtcgaaggtgtgacgcccggcaatgaatatcgctggaaggataccgtcggctccctggccgcgcgacgccaacagtattcgatgtggtcgttcaagatgccggatggttccagctattcgcagagctatcagatcggcttctacgagtatttctgcctgtgcgaggacctcaaggccaagccgctgcccactctgttcgccggcatcgcatgccagtcgcccggccgcgatccgcgccacatggatatcaattcggccactttccgcaacaatgtgattcaggactacctggacctcatcgaattcgcgaatggcgatccggagtccagctcgtgggccgcggtccggcgtgatatgggccatccagaaccgttcggcctggacatgatcggcgtgggcaacgaaaacttcggggctgactacgtggccaagtttgacatgatcagcgaggccattcacgaacgatacccggatatgctgtgtgtgatgagcgccggactgttccccttccagccgacgatgaaacgcagctgggaccatgcgcgagcgttggccgcaaccaattccggggcacatgattccgccaccggtgacgcgattatcgtcgacgaacattcttaccactcccccgaatggtttgcataccaagcgtcacgattcgacgcttacccgcgttgcggcgccggcgtctatttcggcgaatattcagccaacggctattttgccggccaaccgcagaccgaacagggcgcgaacacgtggaagtcggcactcggcgaggccgcgttcctgaccggttgcgagcgcaattccgacgtggtgcgcatgacctcctatgcaccgctgctcgcgcatatcccggctaaggggtgggcgcagaatcttatcgaactcaatccggcgcatgtgaaccccacggtgaattatgaggtggagcggctgttttccacgcatctgggcgacacgacatatgccgtgtccatcgagcagaccgcgtcacgccccgccaaacatctgtatgtcagtgccaccgggcatgacggggatgatgcctgccgttacatcaaaatcgtcaatacctccgattccccggtggatgtgacgttggaaatcgcgcgcggactggccgggctgggcgcctcgccatcgcgaccggtgcgtttggaggtgacgacgttaagcgccagtccgacggcgaaaaccactatcggataccgcggcgaggcttcgggggcgattgtgccggaacgtcgggcttacacattgccgtcgccgtcttcattgctggcgatgaagatcaagccgtacagcgtcacgctggtggcttcgcgctgattgacatcggccattaggccgattcctttgccgttagaatcaccctcaaggatgagggggaatcgtgcagattcagggaataataggggctatcccccatagcgaatacaagcacgggagggcaggatggaaaccacggcggccagaagaccgccggccaacgatgaaggagtatgcggtatgtttatcaatctgttccgcaggcagcgccctgcgctcgcccggctggcccgcaactccaacgcctatcgtcagccgatggttgcggccgtatcatcgtccgcagtcggcgtatccagcatcacctctgcagccaacacagccaacacagacggcgcagccggcgtatccacgctggatgccaccatcggccgcatccacgacatcccgcagtcggccatgagccgactgaccggctcccccaccgtatacgcgcggtagaccggcccagtcggcttcgccgacagcccccgtcagcggggtggagatggctgggctcagagactcggctcgatgatccagctcaaggtcagcaatacggccaaaaacagaacgttgacggcggagtagacggccagataccggcctttcttgtgcgggtattggcgcacgacgttcttgtaagaaataagcgaggccatcgaggcgatgagcgtacccatgccgcccaaattggtgccaatgatcagatcgcgccattggtcgcagaagccggaaagcagaatcgtggtgggcacattgctgatgacctggctggagccgaccgccacctccagcggatggccgccgaccagcgagcgcgccagttcgtagaattcgggcacgcgcttcatgttgccgatgaagatgaagaacatgcagaaggtgagcggcagtccccaatccacgtatttgaatacgcgccgatcggtgaacaggaacacgacgaccacgatcacgcacatcacccacaggggaatcacgtcggagacggccagtaggcagacgatgaacagcagcgagtagacgatggtgcgccagccgccataaccggcgccgtagccggtgatacgaatctcgtcgggctggtgtttgttgcgctcgggagccagcacgccggtttcgaggtcgcccaggtcgccgaccggtttgccgccaaacaccacggaaatcacgatgaccagcaacacggccgccgtgccggaatacggtgccatgatgccgaggaattccatggtcggcatgccggtcagggctttgagatacaggttgtgcgcgttgccgatcggggtgagcatactgcccacgttcgcgccaatggtcatcagcgtgaccacgaggatggtcttatcctcttgcccagccatgatgagcacggccaccgcgaacggcacaaacgtgaccagcgcaacgtcattggtgatgaacatcgcggaaaagaacgtcaaagcgacaagcgtaatgaccagtccgcgcatggtgctgaccttctccagcaatcgcgaaccgatgatgcggaacacgccgatacgctggaatccgcacaccacaatcatcaggcagatgagctggctgatggtgctggcgtgaatgtagcttttgtaatcggcgtccggcggcacaatgaaacacgaaatcagggcgagtattgcggcgacgatgagaatcgtctcatttttggctacattgatcagccagcgtcgcatccattcctccgtgaataacccaatatcgcagccgttctattctacgcgcagaccggcataaggtacgtagtcgcgttgcgctggcggacatgagtttttggaccggtgccgcgcaatgctgtgcccgtatatacggctgcatcattgtgtggcaggccagacacgaataccgtacgtgactggctcaaaccaatggaacatagtttcattcgaggaagaggagcgatgaagttgcgtattaccccagtattcccggtcaaacgtttcgccgccgtgtctgcacagaacgtgaagaacgtgcagttcgattacacgaacatgcccacgtacaacacgatcaccaagtagcgcgcactgccgcactgatcggcggcacttgccgcatacatgaatggccggtgtgctgcggattccttaccaagaatccgcagtacaccggccattatgatatatgccgcaatacagggggggcaatcagccctgcaccttaccgccttgcgcgctacggtatccgaagttcatcatctcgctgttgtaggcgaccacgccacggccgaccgccggcagaacgatcatgccaccatcgccatgatgcgcggcgacttcgtccaaagtggccgtcgcggcatcctcgacgttctcgccggcgaaacgcacacgatccgacacctgatgggcggcgaccaccttgatgaacgcctcgccgatgccggtgcaggacaccgccaccgtggactggttggcgaacgtgccgcaaccgggcagcggcgaatcgcctacacgaccgtgcatctggttggtgatgccgccagtggacgtgccggcggcgatattgccttcggcatcgcgcgccacggcaccgatggtgccatgcttctcccactcatcgccaccggactgagcctcggccaaggactgacgacgctgttcggtgatgaagtactcgttgctttcggtcgcgacgccccaatcggcgatctcggcatcggtcgggtccgcgaacagcacatgcttggtctgctctttgacggcacgcgccgcatcgatcgggttcttcacggtgcttacgccggtgaccgcaccgacctcgccatcgccggtcatcaggcaggcgtccatctgggcgatgccatcgctggtcagggcggcaccacggccggcgttgaattcgggagcgtcttccatgacgtggatggcggcgaccacagcctcatgcgccggtgctccggattccaacaactggtatccggcatcgagggcgcgctgcagatcaagttcggcctgggcgatgcgttcaggcgtgctgtgcttgccacgactgcccgctccggcgtgaacgacaagcgtgatgccggtttcgctgcccgccagttcagtggtcaccggcgaaatggaggatgtggtcatatcgtgtccctttctggagtcagatggatgtgctgacgccaacgtatcgttgctcccgcatgtatgatacccgttgatggccgcgaccggttccgtatttcgcatcatcggctcgcgatggcatgactcgttactgcgccacctcgccactacgccaggggcaatgcgatgccggctcgatcggccagatcacgcaacgaccacgtggtctgccccgctcgcccgacaacgctatgcgcatgccacagcgaactgatgatggcttcctcgcttatttattcgtcgaatgcacccatcgatgtgggtatgcagccatcaaaaaactcgacaaccgcaatgagccagtcacttggctacatctgcgctatcgtctcgccaatgattcgaatgccggtatcaatgtcagcagcatccgggcgcacaaagttgagacgaatatgggaatcatccatttcgtcaacgtcgaacacgctgcccggcatgaacgtgacgccttgggaacggcaggattccaatacatccagagagcgcacgccgtccggtaaggaaacccaaatatagtagccgcctgcaggcacggtccaatacacttcatccggcgcatactgctccaatgctgcgattgccgcatctcgtcgaatgcggtaagtcttgatcaaaccgcgcaaatgttcggcgatgcggccttctttaagcagttccaggcagatgcgctgcgatgacgtgctcgtatgctggtcgaccatgcgccgcagagccgccagccggttaatcacatgcgggtcggccacaacccatcccgtgcgcaggcccgaagtgacggttttcgagaacgtcgacaaatacatcacgtatcccgcattctccatgcctttgagcggtatggggcgatgtacgtcggacgattccccgccgtaccacaaatcgccgtaagcatcgtcttccacgatcagacactgatagcgccgcgccacgtcgatgagttcgctgcgtcgttcgggcggcagcgtggtaccggtggggttttggaatgtcgggacggtgtaaatgagcttgggccggaatcgcgcgcaatacccatccaacaggtctgtacgcataccgtgctcgtccactggaacgccgatgatgcgcgcatccgccgaacggaaggtctgcaatgccgggaagaacgtggattgttcgaccagcacgcagtcgccggggttgatgaacgcgcgcacgatgaggtcgatgccctgctcggaaccggagagcaccatcacgttgcggacgccgcattgtacgcctcgtgtgcgcatatgttcggcaagtagcgcacgcaactcttcgaatccctcgataggtgattccggttggccgtcgaattcccgcgattcgaacgcctcgatgctcaccttgcgcagcagatcgtccgggatatccgccgggttcggcgaaccagtggcgaaatcaataatggtgtcgccgcgctgcgcccgctcggccgaggcgatgtcatggtaggtaaaccggttggaataatcagagaacaacaccgaccatggcggacgcacgacggttggctccgggccctgaaccgagcggctttcacgaatcgtatggaccgccgcagagctgctgccctggtccgtcgtcaagaaaccagtggaggtagcacgttctacgtcgccggaagaggaggcttgcgatgttcccatttctgccgacgatcgtgttgttcgcgttattgcattcccgaagtcactgtttgacgtgtgcggtgttcggcttgcggaggcagccggcagcacgaacgtgcctttgccgactttggaggcgataagaccttcgtccttgagctgctgatacgcctgcaacaccgtggtgcgattgacttcgagacgcgaggacagctcgcgttcgggaggcaggcggtagccctcggccatcgagccggagacgatctgttcacgcagctcggcagccagctgccggtacatcggcaccttgctgcgtcgattcagctcaagctgcatggcagatcgtctccttgattcgtcagtcggataccagtctaacggcagacgaatcgactacagcgacaggaagagctcgtggatgcgggtatcgtccgtgagttccgggtggaaggcggtggccaggatattgccttgacgcaagcccaccacgtggccatcgacttcggtttcgaccgtggcttcgggtccgaccgacaccacgtacggtccgcggatgaataccagtgggaagtccgtgatacgctgcggatcatccgctgcaccaaaatcggcggtggcctggaaactaccgagctgacgaccataggcgttgcggcgtacgacggcgtcgagcgcgccaaagtagacgttgtcgtcattgtcgagctttttagccagcagaatcatgccggcgcaagtaccgaataccggtttgcctgccttgatgtgggcggcgatcggctcgaacagtccggtcgaatgcaggagcttgccctgtgtagtggattcgccgccaggcagaatcacgcggtcgatggattcatcgaaatcctcggccgcgcgcagcagtttccacggcgcaccgagcttgtccagcaccgccgcatgttcggcgaatgcgccttgtacggccaggatgccggtcacgccgtgcttgacgttttcgacgtccgcggactcttctttggaaatatattcaacagctacaaccatgttgtctccttgggccttgactcccgctggcgggagcgtcgccctttcttggctcccctcaaagaggggagccaaggtaatgcactcactcgccgcgagcggccatgatggtctgaatctcgtcctcgttgatgccgaccatggcttcgccgaggttttcggacagcttggcgagcagatcggcgtcctgccagttggcggtggccttgacgatggcggcggcgcgcttggccgggtcgccggacttgaagatgccggagcccacgaacacgccttcggcaccgagctccatcatcagggcggcgtcggccggggtggccacgccaccggcggcgaagttcacgacgggcagacggccgttgtcgtgcacgtacttggccaggtcgtagggcacggccagctgcttggcggcctcgtagacctcgtcgtcgcgcaaggccacgagctcgcggatctgcttgttcatggtgcgcatgtggcgcacggcctgaatcacgtcgccggtgccgggctcgcccttggtacgaatcatggcagcaccctcggcgatgcggcgcagcgcctcgcccaggttcttcgcgccgcacacgaacggcacgtcgaactggttcttgtcgatgtggtacacgtcgtcggccggggaaagcacttcggattcgtcgatgtagtcgatgtcgatggcctgcagaatgcgggcttcggcgatgtggccgatgcgcaccttggccatgaccggaatcgagacagcttcctgaatgcccttgatcatggccgggtcgctcatacgggagacgccgccggcggcacgaatgtcagcggggatgcgctccagcgccatcaccgcgcacgcgccggcatcctgcgcgattttcgcctgttcgggcgtggtgacgtccatgatcacgccacccttgagcatctgggccagattacggttgagttccgcacgattctgcgtcatgagtttcccttcgttcgacgctgcttggtatcgcgcttcattattgaacggattggattggcccacccaaaccagtccaatttggatggggccaatccgcaacttctgcacccatccaatccggcaaccggttgtatggccttatgcatccggcacgtattcgaagatgcgcgcaatcagtgggaggtattagccgacggtgttgccgtagatttgggcttggaggtctttacgggcggtttccatgcgggtgatctggccgaggagggttatcttctcttcgccgtcgggcagctgggccatgcggcgtttggccaaaccgatctggcgcatgaagcccatgtccagtagccgggtgagcagttcggtggcatagcgctgctcttccggcgtggcaggacgcagctgtactgcggcggcaccgccattcacgccaacacctcctcccgacacgttggcctgcaccggctgcgcaccgctaccggtgtcgtcgccaggcagtggcaacggcatgacggccagctcgttgatcacctgattcagcatcggcccgccggccttggtgaggttgtgcatccacagcccctgcggggtatcgtcggatggcagtccgccggcggccgcgatcgcctggaacagggtgcggaacaccgaagtcatgaaatggtcgatggtcagctgcccgaacatggtgcggtcgatggcgcgcggcacctgaatcagcacggccatgaactgctgttcggcgatgaatacggcgtcgtcgatcttgaaatatgcctgttcggcggcgtcacggcgctccaacgccttgcgcgtggccggattggcgtatgggttggtgccgggttccacacgcggctcgtcacgctcgaatcgacgtttgggcgcgtaggcgtcctcatcgcgtacatgcatctgccggcgcgcgttcatcacctcgcggcgcatcacctcaagatccacgccgatacggcccgcggacttgcgcgcgtaagcgtcccatagggagcggtcgcgaatctgcgccaccagcggggccacggctttcatcgcacccacttggccgggcgtgtaggtcaggtcgaaccggctgatggcggcgtcgatcacgaagtcatacaacggtttggcgcgggcgatcagcgagcgcactgcttcgttgcctcgctcgatgcgcaggtcgcacgggtcgagattgtcgtcggccacggccacgaaggtttgggagaggaaggccgaatcaaggccgaaggcatgcagcgcggctttctggccggcggcgtcaccatcgaacgtgaacacgatgcgcgagctcaacggctggtccttgaccttcaacggcccgaccagctggaccgcgcccagcgaatcgtcggcgatcaggcggcgcacaatcttggcgtgctcggcgccgaacgccgtaccgcacgtggcgatggcggtgtcaatgccggccaagtgcatggccatcacgtccgtatagccttcgacgatcaccacctgtcgcttcttgacgatggcggatttcgccaaatcgatgccgtaaagcacctgggttttgcggtagagctgcgtgtccggcgtgttgatgtatttggcggcgatctgatcgtcttcgtatagtttgcgcgcgccgaagccgagcgtgcggccggtcgaatcgcggataggccacgtcacgcggccgcggaaatagtcatagatgccgcgctggccttggcgggccaagcccgcgtcgaggatttccttctgcgtaaaccccttggaggccaagtggcgcacaagattatcccaaccttggggcgcgtagccgcaaccgaaacgttcgcagtcggcttgggagaagttgcggcctccgagcagcttgcgggcgggcagtgcttccttggtcaggatctgggagacgaagaagcgttgggcttcctcgcaggcttccagcagtcgggtgcgcttggagccggtgttctcgcggttcgggccgttgccgctgttctcgtagtgcagctcgatatggtacttgtcggcgagcagttccacggcttcgcggaagtcgatgttttcggattgttcgacgtatttgaatacgtcgccacccaagccgcagccgaagcagtgccacacgccgagtgaggggcgcacgttgaagctgccggttttctcgtcgtggaacgggcacaggcccacgaaggtgccggtgccggagggcttaagcgttacggtcgcagatacaatgtcatacaggtccgcggcggcgcgcaccttctcgacatcctctttcttaatcattccgaccataagtctctagagtaccgcttcacctgagacacggtaaatttttaccgtcggttatcatttcttccgcgaaactcccttcagtcgcctacagcgacagctcccctcacccgaggggagctggctcgcgcagcgagactgagggaagcacccgtccaacacgccctcagcacaagatggagtgcagggccagagcggagttgtcggtcaggcttgcgacctgatcgatggcgacgcgcaggcgctcgttgtcattggtggattcattccaatcggccaggaactggctttccaaagcgtcggatgggagcggcgaatcggccataagcacatcgaccaaatccgatacgatcttgagctcctcctgatggaatggctcgcgctcgcgaggcgccatgacgaagtacacggcgatgcccttcagtgccacgatctcgtaattcgtgtcctcgggaatcacgatgttcgcggaataccgggtcaacggcccgggcccatacgtgtcgcgcgtggcggtttccaccgaccagcagaagcgaccgatcaaatcggacgtgatgttcttgagctgtgccaacgattcgcgtgaaccattgaaatgtgcagggaacaaatgctctcggcgcaatcgcatgaacgcggccagcagcttgtcggcatcccacttcgccccataccatgcgcgcgtctgctcgatgatgtggtccagcatcttcggatcggcgagcacaatcggatcgaacgcgccggtggcgatggaatcctcgacgtcatgcacggagtaggcgacatcatccgaaaggtccatgatctggcattccatgggtttggcggcctggggcgcgccgattttgagccagcggaacaccggttcgtcatccgggtagacgcagaacttcttcgaccgctcccccttggggtgtcggtcggcttcggccaaggtccacgggtatttgacagccgcatccaaggccgcacgggtcaggttcacaccggccgaacgcccgtccgggtgaaagatcttgggttcgagccgggtcaggatacgcatggtctgtgcgttgccctcgaagccgccgatattgctggcgatgtcggcgagcgcacgctccccgttgtgcccgaacggcgggtgaccaaggtcgtgggccagacaggcgcagtcgaccacgtccggatcgcagccgagcaatgcgccgatttggcgaccgatctgggcgacttccagcgtatgcgtcagtcgggtgcgggcgaaatcgtcggtaccggcaatcagaatctggcttttcgcgcccaaacgccgcaaagcggacgaatgaatcagtcgcgcgcgatcgcgttcgaaagccgtgcgcgacttggatttgggcggctcgggtgcccatcgctcctcgtcgaaggcgttgtagccctcatcgctcagcacctgttccccatccaacgttgtttccatatgccaagcataggcacacatatcggccgcagtaatcccgacttcccgaatatgtgccactgacgtcaactcaacggcacatattcgggagattggggccgatttcccgaatatgtgacgctcagcacatgtcaacggcacatattcgggaagaagggattacggggtgccaccgtatggcggtaatgcaccttatagcagcgtggcggggtcgagcttggcgaggtcggcggcgggcagtacttcggcggcatgctcgtaaaggcgcgggatgcggttgcgcaggcaggtgaagatctcgtagctgatggtgtcggcggcgcgggcccaatcgtcggcggtaggctcaacgtaatcctcgccgcggcccgggccgaacagttcgaccgtgtcgccctcgtgaacgccgagttcggcggcggatccgtgcaggtccacgatgaactggtccatgcacacgcggccgcacacgcggtagagcttcggaccttcagtggtcatgatgcgcaccgggccgcccggcttctccacgtgcttggcaccttccatatcgaaaccggaagcggagcggtggatgccatcggcgtagcccagcggcacaataacggtcgaggtgttgtccggggtcaggtaggtgcggccataagagatgccatggccggcctccacatccttgaccgtgccgagctgcgcctgcaggcgcatggccggggtcagatgccagtcgcgcggggtgcccatcgcgggatcgggctcgtagccgtacaggccgatgccggggcgggtaagttcgaagtgaatctccgggcggtccaaagtggccgccgtgttggccaggtgacggatctccggcggaatgccggcctgttccatgcggcgcgtgaagtccttgaatgtttcgatctggcggtcggtggaggacacgaattcgggcacatcgggcgaatcggccacggcgagatggctccactgacccacaatatgcaacacgccctctttggcgagcggcacgagtttggcgagcgcggcgtcgaatccagccggcgtgaaaccgttgcgaccgaagccggaatcgaccttgacgtgtacgcgggcgggcttgccgagcttgcgtgcggcggcggccacggcatcgatgccgggcagggagccgaccgatacgtcgatatcggcagcgatcagctcatcgaatggcacttcggtgccgttgtagacccaagtcagaatgcggcaacggtcggggccgatgccgagtttgcgcagcagcagtgcttcatgcgattgcgcggtgccgagccatgtcgcgccgccggcgagcgcggccagtgcggcgggcagcagtccgtggccgtatgcgtcggccttgaccacgcccatcaccgccgtgccggagttcgggccgccgaccacggagaccaggtgggccatgttgtcgcgcatggttttgaggttcacgatggcctgtgcggggtattggcggcgggtggccgcatagttggccttgccctgctcggacgagaatgcgatttcgggtgctgcgttcatgctcataggcacctattgttgcgcaggaatgtgacgtgtggtcacaatcgtttgttttcgcccggcagtcgtacactaatgaccgatatgcggtttctcggaagccgcctttgattcccggcgttgaggcgtgccgggatcccggaaatccgtccggtctagccccatatcttaagtttcatgagagaagaacatggatctgtttcgtaagaaaagcgtggatcagcttgtcgccgaatccactcccctgaagcgcacgatgcgcaccttcgatctgacgatgctcggtatcggcgcgatcatcggcaccggtatcttcgtgctcaccggcaagggcgcgctcaccgccggcccggccctgtccgtatcgttcctgctggccgccgtctgctgcggtttcgccggcctgtgctacgccgagttcgccgccatggcaccggtgtccggctcggcctactcctatgcctatctggcgttcggcgagctcatcgccttcgtgatcggctgggatctgattctggagtatgctctgcaggcggccaccgtgtccgccggctggtcgggatacttcaacaagttgttggaaggcttcggactgcatctgccggtcgagctgaccgccgcctacggcaccaacccggacgtcaccacctacttcaacctgcccggtttcgtcatcgtgctgatcatcacgtgggtgctctcgatcggcatcaaccagaccaagcgcaccaatgacgtgatggtgctcatcaagctcgccatcatcgtgctgttcatcgtgtgcgccgtgtggtatgtcaagccgtccaactggcagccgttctccccgtacggcatctacactttccagcccggctccacccagccgtacggcattgtgccggccgcatccatcgtgttcttcagcttcatcggattcgacgccgtgtcctcttccgccgaggagaccatcaacccgaacaagacactgccgcgcggcatcctgctgtccctggccgtttccaccgtgctctacatcgtcatgaccatgatcatgaccggcgtggtgccctacaaggagttcgccaagtacatcgacgccccagtggccggcgtgattctggagaccggcatgaactggctcgcggtgatcgtgaacctaggcgccctcatcggcatgaccacggtgatgctcgtacagctgtacggccagtcccgtatctgctacgccatgagccgtgacggcctgttcccgaagttcttcggccacgtgcacgagaagtaccgcaccccgttcaagggcacctggttcttcggtctgctgaccgcgttcgccggcggcttcatcaacatcaacgtgctgttcgagctggtgaacatcggtacgctgtccgcgttcatcatcgtgtcggccggtattctatggatgcgcaagacccagccgaatgcgccccgcggcttccgcgcgccgggcgtgccggtcaccccgattctggccatcgtattctgcttcgtgctcatcgccggtctcaactgggagacctgggtgcgtttcgccatctggttcggtctgggcctgatcgtgtacttcggctacagccgcaagcgctccaagctcggccttgagcagaaggccggggctgacaccaaggtcgctgcgactgaggactgaggtctatcggctgaccgatagccgatggctgctttcgtgaaaaccgtacgctgagttactttcagcgtacggtttttgcgatatgcacgagtttgaacgggcggccgacggaccgtacgtgcgcgacgacgtggaccttacctgaccagctccaccgcggaaccgaacacgctggcgacagccacactcaccactcgtggcgctgataggcgattctggtggtgtcgaccggccggtcgagcagctggatcaggccgcaacgggcgaagccggagctttcgagcacgtgctgcatggccttgttattggggtgggtgtcggcgcgcacgttgccgtagtgcttcagggcccacctgatgcagtcgcgggccgcgtggcgcaccagaccggatgcggcgatgcggtggatggtcacataggtgtcgttgtccagccaggcgccgtcgattttggcgtaggtcggatccttgcccgggcacagggcgaactgggccagaatgcgttcgtggccattgcaggtgtcgaccagcagcatcgtacgctggttggcgatgtcgtcttcaatcaccgattcacgcggaaattcgttgccccactgggtggggttgccgttggcggccatcaacgcgcgtgcgcgtgcgtagattttatgcatctgcggcagatcgcgcatggtggcgtggcggaaacggcggcctgtcgccttgtttgcagcgttcgactgagtcacttctcacctctccgacatgccgggttgccggcacggtgaccggcgattaactgacggccaacctaccatgccgtaggcacaagaaatcccctccgcgttgcatgacggacactaataaacaatggcttccgtccgcaggagccggacagtccagccgagttgaggacagccaccctcagtcggcttcgcccccggctcccgccagcgggagccgaatcagaattgaatcgaatcagacgaatcagacgaccttgcgctcgaacgggtcggagctgatgccttcctcaaggatctgcttggcccattccttggcggtgaacaggctgtggtcgcgatagttgccgcagctcttctcggtggtggcgggcacgtcatcccatgtggccttgtatgcgatgaactccaacgattccttcaacgccttggccacatcctcggtggagtgggtgccccaggtcagcaggtggaagccggtgcggcagccgaacggcgagcagtcgatgtagccgggaatgcgttcacgcagcagcacggcgatggtgtgttcgatggtgtgcaggccgccggtggggatggcctgctcgttcggctgggtcaggcgcagatcgtaattggagatcacgtcgccgtgagggcccgtttcggtgtcgatgtaacgcacgtacggcgccttgaccttggtgtgatcaagctggaatgattcgacgacgggcttttcggccttgtcttctgccatgctgttgcctttctacttgctgagtgttcggtcatgaagtatcgaacagtcatcgtagtcgcgccagcccaagaacgcccgcaaatactccgcggttcgctataggagattgttatgacgcactcccggcattgaacgaggcgatggtttgcatgaagcgctggccgtagagatcgagcttgtgttgaccgatgccgttgaccgccagaaattgcgcgttggtaaccggcttgatgcgggccatgtcgcgcaaggtcttgtcggagaacacgatgtacggcggcttgccgatttcctgggcgatggtgcgtcgcagttcgcgtagcttctggaacagcgattcctcgtcatcgtccgggatatacgagcccagcgcatcgccgggaacattggcggaatcggcagtatcagccactcccccgctccgaccggaaccggccgccgccgacttgcgttccacccgtttgatctcatagtggaagtcgggagcggcggtttcggccgcccgcgcaccgaacatgacgattggcatacgcccttcggcgattgacaggtacccgtccgtggccatctggctcaacacgtcgcgcacgcgagcttcgttcacgtccttgagcatgccgaaggtgggcatccgctccgggttcagccatgccagatcctgtgcccgcgaaccgcgcaggatcttgacgatcttgccggaaccgacgcgctgccccacgtcatgcacgcaacggctgatcgcctgcgccacgcgggtcacgtcgatggtctcgaacgtgctttcgcagttcgagcaggcaccgcatctgccggactgcgaagagtccgccgcaatgtcttcacccgccgcggaaccagcattcggcgacaattcctgaccgaaataccgggtcatataccggtgcaggcagtcggtggtgcggcagtagccgaccataccgtccagcagccggcgcttggactggcgaacgatctcctgctcttcgggagtcaatcgctcgttctcataatcgttatccagcaaccgacgccgggtgacgatgtctgactcattccacagcagcgtgcatcggctgggctcgccgtcacggcccgcgcggccggcctcctgatagcaggcttcaatggattcgggtagattgtggtggatgacgtaacgcacgttggacttatcgatgcccatgccgaaggcgttggtggccacgaccaccggcaccttgtcggtgatgaagtcgcgctgggccacctcacgcgcgtccggcgacatgccgccatggtaggcgacggccggatgccccatctggttcagcgtgtcggcgagcgcttcggtggtcttgcgggtggcgcagtagacgatgccggattcgtccggatggtcggccacataccgcgccacccatgcggccttgtatttggtctccagtttgaccacatcaaaatacaggttcggccggtcgaatccggtgacggtgacggccggattccgcaatcccagcagtcccacgatgtcccggcgcacccgttcggtggcggtggcggtgaacgcacccaccggtggacgctgcggcagcccggcgatgaaatcgccgatacctaagtacgacgagcggaagtcctgaccccactgggagacgcagtgggcttcgtccacggcgatcagcgagatcggcgtacgggcggcaaagtcgcggaatcgcccggtttccaagcgttccggggccacgtacagcagtttgatctgcccggcggcggcttgggcgaacaccatcgcctgctcgtcgggagtttgagtggtgttgatgaacgcggccggcagaccgaggtcgttcagcgcatcgacctggtcgcgcatcagggaaatcaagggagatacgaccaaagtcgcacccgggctgagcgcggcgggaatctggtagcacacggacttgcctgcgccggtgggcatcacgcccaagacatcgtgtccggcaagcaaagcctcgacaattccttgctgtccgggcctaaacgagtcatagccgaagtatcgtgtgagcgcctccagcgccgcctgatgtgctgtcataaacgaccagtgtaggccgaccgcggatggatttcatcgtataacggaatacctcgtaacgatgtacgtagcccttccgtattattatgcgtc

SEQ ID NO: 3101 - DNA, 122259 bp, Unknown
  R215_18m  MAG No. k141_7424
cagcacggccgtctccggactcggtccatcgtcacgcggttcgggcgcatcgtccaacgcggtcacattcgggcgtacgcgccgcacgcgcatgtagatctgccgtttcgcgatgcccagcagccaggacagcaccttcgcatcaccacggaacgccctcgccgaccgccagcagcccagccagacgtcggcgcacacctcctcggccgtgccggcatccggcacgcgcacgcgcacgagcgcccgcaccgccgcagcgtgacgcccatacagggtctcgaaggcgcgttcgtccccggaggcgacccgcgcgagcagatcctcgtcgcgcatcaccgccccaccgggcgaggtcatgtcatcctgcgtatgcggctccttccacggcacatcgtaaacaaacgttcattgatgtatgtagctagaaacgaaccgacggttcacgacacgagcaacgacacgcccggaaggcatatcggattaagttgtgtagaagaacagaaactcacagaagaaatcgttgcgcgcgtgcattaccgagtcccaagcctggctagttcttggcaggaatgctgacatccagctgccagtgggcttgttcagtgtgggtttggaaggtgccgccgtgtgtttcgatgatggtccggtagcggtcgaggccgctgcccaggccgagtcccatgtcggcgggtgtggtggtgtcgctggcggagacgtggatggcgtccgtgtcgaaggtgacgcagatggcgtaccattcgccccggtcggcgtgttcggcgatgttcgcgtacagttccgccagcaggcccgacagcaggcccgacagcagtcgcatggtctccggcgtgagcggccggtgtggttcggcgagcaggttgtcgccggtgaatcccggggcttcgagcctggactcctcctcgtcgatcagcgattgcagaccggcacgctgcgaggcgatgccggcttctgcgggcacgggccgactgccgcactcaaatcgccatcggccggttcaaagcaggatgtaaacccgctatttgcccaacagttcgtcatggctgccggttcgcatgaacatggcggtaccatcatcgcgaatccatagaagcagccagtcgccggcattgccgatgtggcattccaatacgccgtttaaatcaccggtaagtgtgtgggcgcgatgtctacgcctcaatacttccttggagtccgccgtgtcctcaagaaccagacgaatgacttctttcagcgggcgtaaatcagtgtgcttgcgtttgagtttcttgatatctcgctggaatgccgctgtgtaatccggtttgagcattgatcagattcccaacgaatcgaacatctcatcggcactgttgaaacgaggtttgccgtcggcgagcctgttcttcgcctcgtcaagggcctccatggtttcaggcggcacggtcgtataggaaaggtttaggggaatgcgcctctcccggacaatctgcttgtagaaggcgcgggtgaccgaagacaagtccagaccgagatcctcggcaatgtttgcggctttctgcttggtgtccgcatccacgcggactgtgacggatgccatgctcacattaacctccaacatcattacgtaagacaatagtatgtatttgtatgctaatagtcaacattctgcggttgcggcatctcgaccatggtacacatcccgcaagcggattgtttaccggatgcaatcgatgatcggaatgccgaccatccagctgtcggcgggcttgtccagaatggcttctggttcatcgcaacgccagcgcgggttgcagccgtatggctttgatggccggggcaagagagccgacaagcgaggtgacgatggacgcacaggccgcaatcatcgccgccgtatatgggtatgcgggcggttccagcggcgagtcggcgggcatcatccacggaattgcccagaccagcaccgcggagatgagcaccgcggcgaaggcgatgatgaggccgagcagcacggacgagccgatgacctgtatggctatgctggctctggtcgcgcccagtgcgcggcggatgagcagctcgtgcgagcgttgctcgatgccggccaatccgatgttgatcatgccgatggcggataccgacaacagcaatatcgcggtgacggtgacgccgagttggagaaaaccgatgacctgctcgtaatcatcggcattgtcggaacggttccatgacgatatgctgccggtcccgacgtcggacaacagatcgtccaacgcggttttggcgtgttgatcgtccacgccttcattgggatggacgaggatggtcagcccatccggttcccaggcttgcggccagtagcgttgcagtgtggtcgcgttgacgtagatggtgggtgtgtccgtcccgtcggcgatgacaccgttcacccgtgccggcacctgttgcggatttcctgtccgggcgagtgccacggtgccgtcatgcacgtattggcgggcgctttcgttgactgcggtttccagcgtggcgggttcgtccgctccggtcagccatgtgccctcgatgatgggggcgggcatgattcttgtccgttcggcgtcggtgatgatgatggtgacgcggcgtatctccgtgttgccgtcaccggacgacgcccatatggcgaggtcgttgaggtgatattgcgccgatgcgattcccggacggaaatacgcgaggcgttcctgcaaagccgtgacgacttgcatgttcgccgatgatggcacgtcgacgatggcgctataggtgggtgacttgcctcccagtcgcgcgttgaccgcttccagatagtcgcgtccgagcgtgccgacgagaacgccggcgatgagggcgatgatgccgatgaacatcgacagggcggtgaggctggtacgcaacgggttgatgcgcagatccttggcgatcatgcggatcacgacagtcgccccctgtcgatcgtcagtcggcgttcgcatcgggcggcgagctgcgggtcgtgcgtgacgaggatgagtgtgaccccgagttcacgaacatgtcggaacagtatgtcggcgaccatgtcgccggtttcggtgtcgagcgcgccggttggctcgtcgcagatcagcaggtcgggatcgcccaccagcgctcgggcgatggccacgcgctgctgttcgcctcccgacaggcgcgacggcatgctgcacaccgtccggctcccgagcccgacggtgtgcagcatgcgcgaggctcgtcttctgatgacccgcagggggatgcctccccggtattgcaatgggagtgccacgttctcccatgcgctcagatgcggtatgagggagtagttctggaacacgaagccgacatgccggcagcggaagcgcgcccggtcggcgtcgttccacgcggcgcagtcccgcccgtcataggagagcgttccgtcatagtcgttgttgagcagcccgacgatggaggcgagactggttttgccggatcctgatttcccgatgatggcggtggacgttcccctctcgaacgatgcgctgacatcgtccaccgtcgtcagacgttcgccgtcgggcagccggacttcggcgctcagatgttccaactggatgagtgtgctcatgattgcgctcccggtgtgagattcggagctgtcgcggacaccatgtcaccttcctcgagaccgtcgaggatgatgatcgacgtgccgtccgatgcccccaacttcacgttcacggtggcgaacgaatctccgtcacgcctgctgacctggccggaggcgagcctgccggcgactgcggtgacaggcaggatcaaggcgtcctcgaccgccgtcgcggtcagtaccacggtggcgttctgcccgggacgcgcctgcacgtcttttgggaacaggcattgcagtgtgcgagtcgattccgtcccatgcgcagtcgtcgccgatccggccgtatcttccgctgatgagggcggagtggcgacgccgtcattcactaccgcggcacagtccgtgggcccctgcgcgtcggtgatctggaatcggcccgtcaacggctggtccgggtctatggtcgccagcagcgcggtcgcgtccacgctggcgctcatgccgccataccgtatcgagaacagcggatagtccgcggccatgtcgttgtcctgcgcgaccgtttcgatcacgccgtcgaccggagccgtgacctgctgatcgccgacggtacccaacacgtcgcccgcatgcacgtatgctccttgatcagtcgtggagtggaaccagcctttcgccggagtcgtaagcgagaacacaggagccacctgcacgccggtggaggaagaggataacggcgtgatgccgcccctacgtacctcgaccgtggatgctggccgcttcgccgtggaggaggcgtcggacgatggcgtccgcgacggcgagcaagccgtcatcatcgcgcacatcgtcgtggccgtcacgcacgccaacaggcatttgaacggtgcgatcgcattcatttcgtcggtccgttctcatgccggtaccatgtgcagtccgtggtgtagaagtcccgcatggtcgaatagtcgccgagttcggatttgccgatcacatcgttctcgtatatgccatccttgtcctcgtagtagttcttgaaccagtcggtatccagcagcttgcgcagctgctggagggcgcctcgggctgcttccgcgttggtctggctgttgtcgagaatgtcgcgttccaccgagcactgccagtagacatacgcctgtccttccccacttcccttggcatacagcgaggacgcggcctgcgccttgggtatattcgctggaaacgcatcgccgttcatcagttcaaaggggaaatcctcgacggtcgccttgtattcctcgttcgcctgctgccaggtcagcatgccgccacttcccgaggtgccgccgttcggagtcgtcccgcaaccggacagcagcagcatcactgcggtcagaatggcggccctgcgtcgtgttcccgatttcatcatcatgctccttcggacgattgcacaactgtcgccaaccattagcccacagacggcgatccgggagcaaaagactgtcatgcgcgcgcatgacaacgatacgtcgaggagcatgggatgcgcatacgatgggtggcatgacagacctatcggactcgcataccatctccatcggggtgctggacaacgattcgctcgccctcaacgccatagccgtgatgacgagccgtctctccccgcggttccacatcatctggagcaccacgtccccggcgatggcattgcagcgctgcatgacccacggcgcgcgacccgacgtgctggtcgtcgacatggccttgggaggcatcaccggcgcggacatatgcgccagaatccgtcggcgcactccgacgatcggcttggtgtgcgtcacctcctatgaccttgatccatatcggcaagacgcggtcgaggcgggcgcgcaatgcctgatagccaaagatgacatcgtcaaagagctcccgcaggccatacgatgcgcggcacagggcgagcccgtccccggcaccggattccccaccgcacgggaagccaatcgcaaactcaacgaaggacacgcgaccgagggccggctgccggaaaacgacaagccatcgctgtcctccagggaacgggacgtactgcgcctctacgcgcatggatcatccaccgacgagatagccgcgctcctgaatgtcagcaagggcagcgtcttcacctacgtcaacagggcatgccgcaagctccatgccgccgaccgcaaggaggccctcgccatatgcgcccgatacgatctgctttgaaccgtatacaccacccagccatactggccgcggggctggtcctcgcagtggcgatccccgtagagatgggcgtgtactcatcccagaacctgctgtcatggtcgaccatacgcatatcgctgctcgtcgccgtcctgtgcgccatgctcggagcggcaccggtatgggccgcctgtctgctgttcgcggtctcaggatacgcgttgctgtggctgttctcgccgttgacgaccatcatgatcgccgcactgacctccatagcggtcctctcgttcgtcaaaccccgccttggagccgcttccgcactggcggccctcgccgccctcgccgcgaacaacatgcagaacaacctcacctcgtcgaacatcgtaggcatgatcatcatgtgcctatgcccattgtcgctggggttcagtctcaacctgctgttcgcccaacggcaggcgaccgcgacactcaggcaacgactcgaccgcgaacacacggcgcgtcacctgcacgacaccatcagcaacgacctcgcctacatgatcctgcgcatcgaccaggcaagccgcagtgattgccccgccgatcgggagcaatatcagcaccaactcaccgatctgcgcgccatcgccgaaacggcgctcgaccacacccaccaggtgatacgacaacttgaacgcaccgacaaaccagacgatcgcagccgcatcgtcaaaacaaataacgacgacaaaaccgacaggaaaatcgaacagcagcgtgaacggcttgacggcatcattcaatcgcaacgacgtcgccttggcggcctcggattccaaggtgacgacatcctcgggacgttcgaccatccactggcggacgacatcctcgaccttctcgaaggactgctcaacgaactgtacgcgaacatcgccaagcacgccgccccgcacgaatggtacgccgtcacgatctccttcgaccggcggcacgtcatcatttcggcaagcgacgtactaaaggacgaagcggtacggctcggactcggcagcggcctcaagagataccgaaccgttatcgaatccatgtccgggacgttcgacatcaccgatgattccgacaactggaacgcgaacatcaccattccattgtctgtaacacgccggtaaagggaatgacggcctccagctgccagtgggcttgttcggtgtccggctggcttgcgctggtgtgtgttcttcgagcgagtcgatgacctcgtgcgtgtggcccatggcccggctggcggcgtcgcgcaattcgtcgagctgttgctggtattcgtgttcgtcggcgggcatgccgtcggtcccggcgtgaccatcgggacatccagcatgaggattacgcccgtgacaagcgccggccacaggaaccggtccgggcggaacatgccgccgaccaagccggcaagcacagccagagccaacatgatatcgcgcacggtcgcggtgccggggacccgtgccgccatcgagaacacgtactccgcgagcaccgccacggacaatacggcgcaggacgccgcgatcaccggatgcccggcatgccgcaggccaagccggtcggaaagccggggcagagcagatcgtatctggcgcatgcgtccagcacctccttgcggctggcgactcccagcttgtcggccacgcggtgcacgtacgtgaacacgctgcccgtcccgccgctcctgcgacggatgcgccggcacacgtcagcgcccgtgatttttttcccaacgccatatccaacaccggcgcatccggcctggtatgcgggttatgacagtgctcgatcgccaccgcgggcgaacccgtgcccccgcattacataaaagtccttggatacggccgagatcatcgcgcacatcgcatccagggcgaacggatcattgtccaatacgggcgatacggatcgaccgcgccgcagccccggtcatgttatcgtgtcccatgccgctcatcgtggccacggtcgcagccggacaaaacctgctatcatgcgattacttgacacgatgttgcgcttgcgggcgcgaacggattgaattggactaacgggttttatgtagggatgccgaggaggacaaccatgaatcaggggagggctcgactggaacgaattcggtgatggagggctttgcgaaatccccggtcaatcgatttgctgactggttgggatggggattcgtcttcctcggagcgggtataggagcgtttctgggtgtcgtcgcgtacgttcaacactggattagctgacggcttcgaatagttctccgaccgcttctcggatttgccgggtggcatgaggttttcgaccgctcacgtagtggcggcgacctcacgctaatcagtaatacacactttgatctagcagaccctacggctaaggctaggaggccgacgatgggaaaccgcgtatggaaaggtgaaccttccgccggtggccgggccggaacgatcatcgctttgggcatcgcggcgttggtagtggcgggagtatggttcggatggactcgatactagggctatagtccggtttcgaatctgtcgcagacgttctcgatctcattttccgaggatgcgcgggcaatcgtcagcaaggacgaggaaagctttcatggggacggataccggtacgtgaaggtcgccgctgacccagaacaagtcgacggcaccattctggacggcagggattactccagtggccaactgccccaggagaacatccgcataatcaaggaagcggatgcgaccctgcgattgaacctgggaacacagctcgatgcgctctacgaccggcctcataaggagataaccaacgagggcggcacgctgatcatcatccatgatgccgattcctcggaatggcatttcttcgaatgcctcgtctgaaagctgagcactcccgaaacatatgcgattgtcctgaagaagagcccagaccaaccaagccccgattatccagataaaaagaaacccccagtgcatcacggctgactcgaagaccgtccggagaggccctttgggggaattcttgatatatcataatgagccatgagccgacagtcaaattcaacaactgatttcctctcacggactccaaggaaaggaagtccgcgggagaaggcgctgcgcgcgtgcattaccgatgaacggcttgccacctacaattatgaggctcaaagacgttcatgcccagcgctagagctgtacctgtgggatcacgacatggccagcgcctgtatgggcgacatcgccatcctcgaggtcgctctgcgcaaccgcatggaccggcaactctccctcctcgctctggagcagaatggcactgaagactggtatatggcagggctacaattcgatgaccagattcgtgaagcgtggaaccatctcaccccgcaccagcgaaaaaatcatacgcatggccatctcatagcgtcattgacattcggattttggcgcaatctcttggaagacggcggaacaatccacacgaagtggccagaccagcgccgtgcagattatgagaacgatttatggcgcaaaggactcgataagacattctccaatgggcgccggtatgcccgtgcagtggaagaacgctggacgagaaagtacgcgctggatatcgtaaaaacagtgcatgccctgcgtaatcgggtcgctcaccatgagccgcttgtcaacggcatacctctgccgggtgagaatcgacggattgcattggagaatgcgacgcaggcgtgcttcgctctggcgatgatcctggaccgagacctacacgcatggttgatggataacagcaagatgaaacttgtgctcgaacacgagctgaagcctaatgaataggtagtgagtatcgttttcgccaatcatctcttcagtgggaatggcaatgagctgcagcgacaccaacagattccttaggatccgacaccggcacgtccggcctgatatgcgggttatggcagtgctcgatcgccactgcgggcgaacccgtgccccacatgacatggaagtccttggatacggccgagatcatcgcgcacatcgcatccagggcgaacggatcattgtccaatacgggcgatacggatcgaccgcgccgcagccccggtcatgtcatcatgtcccatgccgctcatcgtggccacggtcgcagccggacaaaacctgctatcatgcgattacttgacacgatgttgcgcttttggccatgcgcaggttgaatgggattgcgccacgaaaggatatgccatgaacgatctgctgattatcgacatgctgcccacgtacgggctgctgttctacctgctggtctcggtattcgtcttcgtgggatgccgtggtctgcgccggaggacctcggatcgtggcctgctgcgttttgccgtaggcgcattcttggttgtttccgcgctcggcgccgtgttcgctgcgctggtgtatatcatggcagcgcctttggcgcagccggatatggtcgacttctaccgcacgtaccggccaggagccctgatcttcctgctgggattgttcatcatacaatttgtcttcggcgtcgctgccgtgtatcggggaaagtaacctggtatatcctgcgataaacgcattggcagacacttgctgcctatctgtaaacacactctagataaggcttgcggccgttggccgagcacagtagtagtgtggtctgctgtgtcaacaggaggagtgtgaccaatgcggctgattgagacatggctggcggaccaggaacgcgcgtttgacttgttcgcgaaattcccggcggaggagacgggattcgagaacccagcggccggcatgaatcgtgaacggttcgccgcatatgtgcgagggttgcgtgatgagtcgcttggcgtcggcctgccggacggctgggtgccagccaccaaatacattctcgtcaacgatgagggcgactatgtgggcatcttcaacctgcgtcaccggctcaccgacttcctgcgcaacggtccgggccacatcggctacggtgtcgcccgcgaataccgcggtcacggctacgcgaccgccgggctcaagctcacgcttgccaaggcccgcgagctcggcatcaaggaggcttacctgagtgtccacaaaaccaatccggcaagtcttgcggtgcagcagcattgcggcgcacgtatcgaccatgaggacaagacggaatactacacacgcatcgccacctgcacggagagcgatggcctctatgcgcgaggcgattgacggcgcctctcgcgtataaatggccgattatcaatcggttttaatcaatctcgcctcggtcgataaagtcgccgtcgaggaaccaataatcgtgcggatttccgcgtaacgccatgaacggcgtgagttccacgccctgtgtctcagctctgctcagcagataggcgcggataatccacggatactctagcacgcccgacttgagggtgatgatttgctccactctgctgccgctgacgccaaaatccctgccgccgttcggcggtcagacccagccggctcatgttctcctgaaattcgcggatagtcgccgcgcgttgctcactgttcaaagacatggcttcatgaatgttgcattggcgccttaatcatccatagttaaggcaccacgcaacatacgattcgcttacccacgcagccatacgacgatggttggaatggactgttcggcgaagcggtctatggcgtcggcggtgacgtaggcgtgggcggtgaggcgcaggtacagttcgccgccgaccgcgctggccgcctcggatacccgacgctccgcgtaatcggcaagatcggacatgtaccggcgcacggcatcacagccccacagtcgctcgatctcgcgcagggactcgggcgcggcgatcggaccgcataaatcctgggtgccttgctcatcgaatcgctccgggaacgggtcagcgaaaccccacgagtcgatcagtggccacaaatcctgaccatcctgaccgccttcgggcggaatcaccagcaatgccgtgccacgcggcgcacacgggaacttatgaaaattgccgacccaccaatcggactgcagtccgccggccggatcggccagttgggcgggagcgtgcgcgccatcaaccaaaatgcggatgccgcggcgatgggcttcggcggcgatgcgctgggccgtaaacagcatagcggtggcggaagtaatctggtccaacacgatgaacgacgtacgctcgctcatctgcgcggtcacggcgccgaccacgccatcctcgtcggcgtcaatggtaactggtgcatcttcctcatccatgcgaatgagacgaatcgcctttcatcccaatgatttcgctctcatggctgatacccgcgtgccgtcatgttccgtaccttggaatcagaagtcgagagtcaaggtccgaaaccgaacggagcgggccgaagcagggagcattgaagatgggatttcttaagaacttttccgaaccgtttgcattcgcgatggcattgtggccgtttgtgtccatgctgctgaccgtgccggtgctggcgttgctgtatcaccgcgacaatcgcatccgactgtcgtcggccatagtggcgtatggcacggtgctgtacctgctcggcctgctgtgcttcacactgtatccgatgccggccgactcggcggcctattgcgccgcgcaccatctgacgccacagctcaatccattgcagttcatcggtgacatccgtaccgatggtctcaccgccgtactgcaaatcgcgtttaatatcgtgttcttcctgccgttgggcttcatcatgggccgtatctggcgttggccgctgccggttaccgcagtactgtcattcgccacgtcgctgtttctggagacgatgcagctgaccggcctcatgggcgtgttcccgtgcgcctaccgtctgttcgacgtggacgatctcctgtggaacacgaccggcgcgctgatcggattcgcgctggccatgctttcgctgcgcctgattccggcgcgggtcgccgatatgacgccgaccaccacacctggcttcatgaggcggctgatcacgttcatcatcgacatgacgctgatcgggttcgccgtgatgccgacgcatctgttcgtcatgatcgtccgctcaaacctgccctcgggctccaacggctcatggcagtcgatggaaccgttcgactggaccggctcgatcctcttcctggcggcgctcatcctcttcgagggcgtggtgccatggttgcgcggcggctgcacgttcggcggcagtttcacgcacatgacagtggaaacccggccgcgagaaggctggcggcgtgcggcgttctatgtggcgcgtatggcgacgctgatcgccgtggtgtggtggcatagtggcggattcaatctgctggtgttcatcggcctcggcatcttctggctggtcaagcgtcagatgccgtacgacctgatataaaccggcgctccgctgcttggcgttacaggaaaacctccgaccactggtcggaattcggaatgctgcgcagcgggccggccaacgatacggccaatcccgctacggaacagaccacggctacggccatcaccgccgtgaaaccgagatctggctgttgcaacagccagccgaccatcgccgggcatgccgcgcccagtatgccgaccgtggtttcaaatacggcagaagcccgcccctgcatgttgtcgggtgtcttgccgtagagaaagcccagcagaccagcgttcaacgcggggaacggcaggccggccagaatctggcagatcagaatggccgcgtagctgtgcaggaatagcagtggcatctggctgaccacgaacaacgccagcgcgcccgcaatcagtttccctgtgggaaccatatcgactagcttgttggccaacagcgagccgaccaaagtactcacgcccattgccgtgccgagcagtccgatcatgaccgcgttggcgccacgggcggccaacatgatctgcgcgccggtgatactggccacgcaggcgatgtcaccatagcgccgagcatgattgcggataggaaattccttttgatcagggcccatcgccagccttcgaccaagtgcgtgggaaatggcacaacagaagtgccgtgggcccaaacggcgaccacggcttagcgcgacgagtcaacgcgcattagctgtctgcgaacgacaccaacaccttgtacataacaatgccctttgcaaaaaccaaactccaattgttgtaccagttcgagcacgggaccaggcacgtcactgggctcaacataatcggccatcaatggtttctcggcttcgaggggctgatttcgtccggtggggacatctacttggctttcgaggggctgctcaaacgccaaaccgcgagtataaacggctttgtggcaacgacatgacgccatttcggagccttgcctactcgggcatcagccccttgaaacgcaagtagacctccggcgaacgccaaatcagcccctcgaaatcgagttaggcgttgttttcgcgtttgcgctgccgttcgagtgcgtaataagccgcgtagcagcaggcgacgaacgggatcatgcaatacagggtcgaacgctgcgtatcatcgagcaccacgagcaccagcgcgccgatgcacatcacgatggccagccacggcagcaccgggaaaccgggcgcacgatagccgagctcatcggcgctgtgcccatcccgcgcccattcgcgccggaaacggatatggcacacgcatacggagaaccacaccaccagcgtcgccaaacctgacacggcgaccaacaccagatacacggtcgaggcggcgatcacggaagacagcaacgccagcagtgagcccgccatgctgaacagcacggcccacaccggcacaccacggaaattcgtcctagcaaaacgttcgggaatcagccgctccttggccagcgaccacaccatgcgcgaacacacgtacaggccggagttcgcggcggaaagcacggccgtcaacaccacgaagttcatgatgtcgccggcgaacggcataccgattgactggaacaccagcacgaacgggctcgtatccacgccggcctgatgccaggggatcaaggccgccatcaccagaatcgagccgatgaagaaaatcgccaggcgcagcaccgtggtgtgcacggccttgggaatcgcacgcgagggatccttggtttcgccggccgccacgcccaccacttcggtgccggagaacgcgaacaccacggtcagcaaagtcgagaaaatcggcgcgataccgctcgggaaccagccgtcagccacgaagttgcccagcaacggcgcggaatcatgaccggcaatcggtatggcgccgaagatcgccagcaggccgatcacaatgaacgcgatgatggcgaacaccttgattgacgcgaaccagaattccgcctcgccgtacagccgcacggacatgatgttgagcgcgaacaccaccacaatgaacacggccgaccacacccaggacggcgaatgcgggaaccatcgctgcatcaacagccctgcggccgtgaattcggaggcgagcgccaccgcccagttcagccaatacaggatggcgatggtgaacgcggtgccggggccgatgaaccgcttcgcatacatgtggaagctgccggcgtacggcatggccacggacagctcgcccaacgacaccatcacgcagtatacgagcagagagccggccgcgtaagcgaggatcgcgcccaacggtcccgcctgatgaatcgcgtagccggagctgacgaacagaccggtgccgatcacgccgcccagggagatcatcgtcaggtgacgcgactccatcttccgttcaaggccggtatcgtccttgggtgtgccggctgccgccatgctcaggtctcctttggtcgggtgaacagttgtgtctcgtgtcggttgtgcgggcggcgctcgatgccgcctaccatatgatagcggtaacacgaacagcgagtggaacacgaggagtttggaatgatggaactgtatatcggatcgcatctgtcgacggccggcggatggaatgcgctgctggaacgttcccatgaggagggcggtaccgcgttcgcgttcttcccgcgttccccgtacggcaagcgttcgaaggcgctcgacccggccggcgcggcggcgttcggtgcgcgtctgaaggctgagggctatgggccgttggtcgtccatgcgccgtacgtctacaatctagccggcaaggatgaggccaagcgcacattcgcgatcgaggcgttggccgaggacatcgagctgctgaccgccatccgcgaggccggacaggaggtgtatatcaatattcatcccggcgcgcatgtgggccaaggctccgagaccggctgccggctgatcagcgagggactgaatcaggtgttcgagcgcgcggccggcgtcatggtgcttctggagaccatggccggcaaaggcacggaatgtggccgcaatttcgatgagctcgccacgatcatggatggcgtggagaataaggcgaacgtcggcgtcacgttcgacacctgccatgtgttggatgccggctacgatttggtgcacgactacgacggcgtgatgcgccagttggatgaggcgatcggcttggccaaggtcaaggcgattcatgtgaacggttcgcagttcggcctcggctcgcacaaggaccgtcacgccaatatcggcgagggccagctcggcatcccgttcttcacgcgactggtcaacgacccaaccatggccaagctcccgatgattctcgaaaccaaggagcagacgcccgccacgcatcgcgacgagatcgagttgttgcgcggattggtgcaaaagtagtcgtagtcgaccaatgtcgagcagaagagacctgtttttgactgatggctatacgaggttagctatcagcggggcgttgattgacccgtcttcatatacagctgcatagccggttccagctgcaagagctcaaaacagacgcatgggttcggcggaatccaatggctgaataagacgtttgccgtcgctgttcagtggcgcgacttcgtgaaattgcagatgccgggaaagcatggtacccgcttcccgcatggaatctaacagtgcggctccgtcaacggagcggtccagccatgaggcaaccatattccgaggaaccagcaggggcatgcgatcatgcaccttgacgaactcgtccgcggcagggcaggtgatgatggttgcggtcagctgccatggcgatgcgggagacggcctccaccatgagtacaggccggccaaagacaatagttcatcatgtggcgcgtgaaaatagaacggcctgcgacctttccattcgtagtagccggaagcggggatgatggctcgcatggattttgtggattcggcgaacgccggcttgacatgcgcagactccacacgcgcattatatgtggggtagctcagcactttgctggcgctccatcgcggcaccagcgaccaataggcaccggtcagatgacggcggccatccttgctctgtgccaccacgccaatgttctgcatgggtgcgatgttgtaggaaggctgtggcagagtgtcaacgcgcacgtcatcctcgtctaccgcgaactgtgaggccacggcatcccaatccaaatcaagcgcgaatctcctgcacatgcgcccagtctatgccatcaatggaatcaatcccaggccgtatgaccgatattcacggcgattttcctttttgttggccgctctggttccgtagcgatacgaaccaacgaggaatagcccagaatgtaggacgggttcggcaatcgggacggggcgtgacctagagtggcgcatgaccgaacaccaacaaagggaggaccatgtcggttttggacgaactggtggcgggagcgctggaggatcagcgcgcccgtgagctcaccgtatcgcttgaggacgtgaagaaggccgcgctggcggccccggctccgattgacgcgacacgatggcttaagcgcgccgacggcatccccgtgatcgccgaaatcaagcgcgcgtctccgtccaagggccacctctccgacatcccggacccggccgcgctggcccgcgagtacgagaagggcggcgcaagcgccatctccgtgctcaccgaaggccgcagattcctcggcggccttgacgatttcgacaaggtccgcgccgccgtgcacattccggtgctgcgcaaggacttcatcgtcaccgactaccagatcttcgaggcccgcgcccacggcgccgacctggtgctgctcatcgtcgccgcattggacgacgcccagctcaagcacctgctcgacctggcgcacgagctcggcatgaccgtgctggtggagacgcacacccgcgaggagatcgaacgcgcccgcaaggccggtgccaaggtgatcggcatcaatgcgcgcaacctgaagaacctcaaggtggacgtgaacaaatacaacgaactcgcggccgatctgcccgatgacgtcatcaaggtggcggaatccggcgtattcggcgcggtcgaggtcgaagactacgcccgcgcgggagcggacgcggtactggtcggcgagggcgtggccaccgctgatgatcatgaacttgcagtggaacgactagtaaaggcaggagcacaagtgaaagcatccgaaaccaccccgctcagcgaacatcagggaccgtattggggccagttcggtggccgctatgtgcccgaggccctcatcaccgccctcgacgagctggagcgcgtgtacacgcaagccaaggccgaccccgaattccacaaggaattcatgacgctccagcagcgttacgtgggccgtccgagcccgctgaccgaagccccgcgcttcgccgcactggtcaagcagaagaccggtctcgacgcccgtatcttcctcaagcgcgaggacttgaaccacaccggcgcgcacaagatcaacaacgcgctcggccaggccctgctcgtcaagcgcatgggcaagactcgcgtgatcgccgagaccggtgccggccagcacggcgtggccaccgccaccgtgtgcgccatgctcggcctcaagtgccgcatctacatgggccagatcgacgcccgccgtcaggccctgaacgtggcccgcatgcgtatgctcggcgccgaagtggtcgaggtgaccctcggcgacaagatcctgaaggacgccatcaacgaagccctgcgcgactgggtcaccaacgtcaaggacacgcactacctgctcggcaccgtcgcgggcccgcatccgttcccggccatggtgcgcgacttccagaagatcatcggcgaggaagccaagcagcagctccaggactggtacggcatcgaccatccggacgcgatctgcgcctgcgtgggcggcggatccaacgccatcggcgtgatgaacgccttcctggacgacgagcgcgtgaacctctacggctacgaagccggcggcaacggccccgaatccggcaagcacgccatccgcttcgcccccggcaccggccagctcggcatgttccagggcgccaagagctacctgctggaaaccgacgaaggccagacgctcgacacctactcgatctccgcaggcctcgactacgcttccgtgggccccgagcacgcatggctcaaggacatcggccgcgtgaactacagctgggccaccgatgaggaggccatgaacgccttccgtgacctgagccagaccgagggcatcatccccgccatcgaaagctcgcacgccgtggccggcgcgtacaaggccgccgccgatctgaaagccaagggctatgacaaggccgtgatgatcgtgaacatctccggccgaggcgacaaggacatggccaccgccggcaagtggttcggctacctgaccgacgatcaggccgccgcgctcgatgtgaccggcgcccacggcaatactgtcgcctgaacaagaagaggagattgttgattatgaccaatgaagcaaccacgccgtccggccagccgctgggcatcagccacaagcccagcaagtcaggcgctatgttcaccaagttcaaggccgagaacaagcccgccttcatcggctacctgccctacggcttccccaacccggacgtctcgcttgacgccttcaagacaatggtcgagcacggcgtcgacgccgtggaaatcggcctgccgtactccgacccagtcatggacggcccggtcatccaggctgccgcctccatagccctgaacaacggcgagaccatcaagcgcgtgttcgaggccgtcgaaaccgtggccaacaccggcggcgtgccgctcatcatgagctactggaacctcgtgtaccactacggcgtcgagcgtttcgcccgcgacttcgagaacgccggcggcgccggcctcatcaccccggacctcatcccggacgaggcgggggagtggatcgaagcctccgaccgtcacggactcgaccgcatcttcctggtctccccggactcgtccaccgagcgcctcgaaaccgtggcccgcaacgcgcgcggcttcgtgtatgcggccgcccgcatgggcgtcaccggcgaacgcgccaccatcgacgcctcgcccgaactgctcgtggagcgcacccgtcaggccggtgccgagaacgtgtgcgtgggcatcggcgtgtccaccgccgaacagggcgccaaggtcggctcctacgcggacggcgtcatcgtcggctccgcgctcgtgcacaccctgctcgcggacgacaacaagaccgcacgcgacccgaaggaaggcttgaagctgctcgccgccaagagcgaggaactggccgaaggcatccacaacgcccggtgaacacccggtgcgcctcacgcgggttgtgccgtgacacggtagggtagtcacagagcatcaagcacaacccgcgcgtggacacaccatgagcaccagcaagtagaggcacgatgaatctggcttatattccctcgccgaccttctccaagttcgagatcggcccgttcactatccacatgtacgcgatctgcatcctgatcggcatctgcgtggccgtatggatcctcaccacacgttggaagcggtacggcggcaccttcgaccagattctcgacaccacgctcgtcaccgtgccctgcgcgctggtgggcgcgcgcctctaccactgcatcaccacgccggccgactacttcccgcccaccggcaacttggtcaacatcctcaaggtgtgggaaggcggcatggccatcttcggcggcatctccgtcggcaccttggtggcgttcctgtggtgccgccacaagcactatccgttcgcgatcttcgccgatgccatcgcccccgcgctgcccgtggcccaggccatcggccgactcggcaactggttcaaccaggaactctacggctggcccaccacgttgccgtggggcctgaagctcaacgacgcggacgccatcggcaaatccgaaatctgctattccggcgcgcaatgcccggactacagaaccacgctgttccaccccacgttcctctacgagatgatctggaacctcatcggcgccgcgctcatcatctacctcggccacaagctcgccgaccggctcaaggccggccagcagttcgccatgtacctgatgtggtacggcctgggccgcacctggatcgagaacgtgcgcatcaactactccacggtgatcctgggcctgaggaccaacgtgtggaccgcgattatcgtcttcgtgctcggctgcatcctgttcgtcgtgctctaccagtacggtccggaccccaaggcgcaggcgcgcgggcttgcggcggtcaccgccgacgagctcgagcgccagagcatcgaagaggaacagcttcgccagaagaagcaggccaagcgcactaagtgacaccacaataaacagcgccgaaacagcgcgaaacacgggaccccaagtcccattgcacagataaggtaggaaaccatgagcaatatcgcaatcgcacccagcatcctgtccgctgacttctgcaacctcgaacgtgatctcaaggccatcgccaacgccgacctggtccacgtcgatgtcatggaccatcatttcgtgccgaacctgaccctgggcgagccgatcgtcggccgcatctgtcaggtcaccgatctgccggtcgacgtgcacctcatgatcgaggacccggaccgttgggctcccgaatacgccaagctcggcgccgcctccatctccttccacatgggtgccacccacgcccccgtgcgtctggcccgacagctgcgcgagatgggctgcaaggcctgcttcgccgtgcgtccggccgaaccggtcgagccgatcttcgatatcctcgacgagttcgacatggtcctcatcatgaccgttgagcccggcttcggcggccagaagttcctcgacaaccagatggccaaggtccgccgcctgcgcgatgagatcacccgccgtggcttgaagacccgcatccaggtcgatggcggcgtgagccccaagaccgcgcacatcgtggccgaagccggcgccgacgtgctcgttgccggttccgccgtgtacggcgccgagaatcccgcccaggccatcgacgacatccgcaccaaggccgaggccgcgttcaaggcctgagctccaagcctgaaccgcaatccacctttcatccataaccgcaagaaaagaatctgaatcacatgaagacgtttgaatccctgttcgccgaactgtccgaaaaggcccagacccgccccgaaggctccctgaccgtcgacgagctcgacaagggcacccacttcatcggcaagaagatcatcgaagaggccggcgagacctggatggccgccgaatacgagggtgcggaccgcaccgccgaggaaatgagccagctgctctaccacgtccaggtcatgatgatcaagcacggcctgacgcttgaggacgtctacaagcacctgtgagaggaacgcaaatgctgagaatcgcagtgcccaacaagggcatgctatccgaacccgcgtggaacatgctggccgaggccggctaccgtctgcgcaccaaccctcgccagctggtcgtgcaagatcccgacaatggcatcgagctgttctacctgcgtccgctcgatatcgccgtatacgtgggccgcggtgccatcgacgtcggcatcaccggccaggatctgctcaagaactccggtaccgccgcactcgagcacatgccgctcggctttggtgcctcgaccttccgtttcgccgcaccgaacgaatccccgatcaccaccctggaggatgttcagggcaagcgcgtggccaccacattcgataagctcgtacacgactatctggtcgagcacggcatccaggccgagaccatccatctggacggtgcggtcgaatcctccgtgcagctgggcgtggccgacctcatcgccgacgtggtctccaccggtaccaccctgcgcaacgccggcctgcgcgtgtttgccgaaccgctcatgcactccgaagcctgcctgattcgctcgccgcgtctgaacgagcaggatccgcgtctggccgtgctgacccgtcgtctgcaaggcgtgctcactgcacatcagtatgtgctcatggactatgacattccgatcagcaaggtcgccgccgccgtggccgtgacccccggctttgaaagcccgacgatctccccgctgcacgacaaacagtggaacgccgtgcgagtcatggttcccaaggccaaggtcaatcagctgatggatgatttgtacgaagtcggcgcacgcggcatcatcgttaccgctctgcaagcctcccgcatgtagactgttagtcgatatgaccaaccagaaagtcaacgccagatacagtccggaagcacgtgacatctatttcaccgtgcccaatttgatcagcgcgctgcgaatcatctcgattcctttcatcagcgtgctgatctccaagcatgaggtgattgcggcgctagccctgatcgccatttcctcggcttcggacggactcgacggcatcatcgcgcgcagattcaaccaagtgagcaagatcggtcagattcttgatccgatcgccgaccgactgctcattttctgctcgattctggccctcagcgtcgccggcatcatcccatggtggatgctgattatcgtgggactgagggatctgtggatggcgattcaggtgctatggcttgcccagtacggttatggtccgctgcccgtgcatttcgtgggcaaggctggtaccgcgctgctgatgatttccatcgtcagtcttattttcgccgatttgggcaccagtacgttcttccacttgctctacatcgccgcgctggccgccggcatctggggcatcgccatgtattggctcgccggatatatctataccaagcagggcgtcggattgctacgcaaggaactgggggagaagtatggcgcttgaggccacggccccggtctcgttccccatacccaaggagaatgagccggtacgacgccgcgccgtgttctcccactcagtccgaggcgcggaatcgcatcatgcgctttccccggatgacgccgccgccatccgcaccccacgccgccgtaaaaccaacgacgattcgcttcagctcatcgatgatcttgtcaatcgtccgatggatccgatgttctccgactcacgactggtccatgagcatcgttcgaccttctccatctggtttaatcgcatcgtcgtattcatcatctgcgtcggcgttggctttgcctgcagcctattcgtgcaacagttgcaatccgatccgcgtaagcaggtacggcagactttggccacgcaattggagaatcgcaactcgcagatagacgaactcaccacggacgtcaataatttgcgatcccaagttgacgaacagtccaagaaaatctccggcagcgtgaaaagcgacacgcttatccaagacgaaatggtcaatggtgccacggtggtcgaaggcgaaggaatcaccatgacgctggccgatccaatcgcggcaagccagtcggatcaatcctcctcgacgagagtcggcacctccacgaacatccgagtcatcaccgatctggatctgcaacaactggtctccctgatgtttcaaaacggagccgaagccattgccatcaacggtaataggctcggcgcgcaaacctcgatacgcaaggccggcgggcatattctcatcggcatgaccgcgatacaaagcccctataccattgaagccataggcgataagagcgccttggccgaagcgatgggggagaagagacttgcaagtctttacgattccttcaaggaagccggtatctacccgcaggtgagcaaatccaattcgattacacttgaggcagcagtcactggagaagtgaagtacgcggaaaggaatgaataatggcagccgttctgggactgatcatcggcgtcgtcatcggcgtgttcgtcaagccggacattccgatcatcgtgcagccatatctgccgattatggtggtcgctgctcttgacgccctgctgggtgccgcgcgagcctatttcgagcgcagcttctccgaccgcgtgttcgtgatctccttcctcgccaacgtggtgacggcaacactgctcgtgttcctcggcaaccagctcggcgtcggttcacagctgcagacggccgtcatcgtcgtactcggcatccgcatcttctccaacgtgtccgcgatcagacgcttcatcttccgaggctgacaagggtactgacgtatggcacgtaaagcacaatcagacaacatgctggagaaaatgcgcgaccagcatgcacaagacaaggtcaacgaccggatggaaaccgggtcgttccccacggtgcgcaagaagccccggaaggatctcaaccgggccagcaacaaatcacggctactatcctcgattctcattgctctgatgtgcgcgctgctgggtttcgcctacatgagccagatcaataacactaaatccacgtacgaaacgatggacgagagcgaactggtaaggctgctgaacgagtcgaatacgcaaatctcgaatctcgagcagcgtaaaacccagttgaacagccagctcaactcactgaaatcggcggctaacgagcaggagcaggcgcgtaagatcgccaagcaaaacgaagagaccagcggcttgatctccggcagactcccggcgaagggccaaggcgtgaccatccggatcggacgaggctcgacgactaaagtggacgcctcaatcatgttcaacctcatcgaggaactccgcaatgccggcgccgaggtaatcgccatcaataacgtgcgcgtcatcacctccacctacattcaggacgccgaggaaggcttgatcgtggatggcaccaccatcaagcccacatacacggtgaaggccatcggcaatccgcaggagctgtccaacgcagtcgatatcgccggcggtgtgggcgctcaactccaggtgaaatacggatccaacgtcaacgtgcagccttctgacagcatcattatcgacgaagtacgcgaagctacgcaaaaccagtatgcaaagacggtagaataggggattatgaccaacccgattcctagcgcaggcgaaaccaccattatcggcctgcccgcgattaatgtactgcccattaccaccaccggcgatcgaccgctgactcaagaggatctggacaccatcaccagattgtccgagggaacggcattgctgatttccgccaggggagcggtctcaggttctcgttacttgcttgacgaggatgaaatcaccgtcggtcgtgatccgcgagctgatattctgctcgacgactccaccgtatcccgtcagcatgccgtgttccgcagggtcaacggtcagttctttgtggttgacgcaggaagtctgaacggcacctacgtgaaccgtcagcgtgttgatcaggcgacgctgaagaacggcgacgaaatcatgatcggtaaattccgcctcgtgttcttcacgaaatccgccattatttcccaatagtccacacctagcatggggctagactgattgcagaattgcaatcatgtgattacaccagtgtgagtcacatgcgagacacgcatgagttaggggagtgccatgggacagacagggctgcatcttcatgtttcgcttgaggaccgtcagaatctgaacgctgacgcgattcagggggagttgttctccaatgtcgatactgaggagatcaagcgcggctaccgtggcactgtggcctccaaggtggccggcatcacgtaccgacagctcgattattgggcacgcaagcagattgttgagccgtccatcacgccgtctcatggctccggttcacgccgactgtactcgtttaaggatgtggtgattctcgctgtatccaagaagctgcttgatgccggtgtgaatctgcagaatgtgacggcggccatcggattcttgactcaacgcagcaccgatcagctggccaatgtgaccatcatgtgcgatggtcaaaacgtgcacgaatgcactaccagcgaacagatgctcgaactgttgcaaagcggtaaggcagtgttcgccgtgtcggtgggttcgttgtggcaccagattgagacggccttggaacaggaagaatatattgatcttgaggccaagccgctgacgattgccacgggccgtccgattgatgaactgactgccatgaggatgcgcaagaagctcgaggcacagcgcttgcaacgcgcaaccgcctgatacatgtatggttgttggcgacttgccggctttggtcggcaggtcgctttgttgtatgtgttgcttttgttgcctgccatcttatgtttttatatgttgcggtgattattatgactgattggaggaccgggtgaacgggattgttgtcggattgttgccgggcgttctgtggatggtcgccgtcatctttgctgtgtccatcatcactataacggtcagccgaggccatctgttcacgccgaaacgccggcgaccaccggtcgatccggtcgactggtcgatggtgaaaacgcatttcatgtcgtttgcggcggcgctgattccgtttcccgtgttgacgtttacagcggatttgatggatgctcgcatgctcgcgttctacgaccacgcgcaattgcccggagcaatcatcatattcgtgctggtgctgctggaactcatcgccatgtatctgcaggcacgcaacgcctcagaaaccgaaatggacaagcgtttgggcgttgcttctcaccggaataaggatgatgttgcgaagtagcagattctctgcggcgaggctaatccgcagctagatactactggttcggctaaaatcaccacatactattaaccgataacgtacgttatgtcagattagttatccttgacgaggattcagtcgcctgtatcaactagtccacgcataccaggccgacagccaaaaggccgacagccaaaggagcaccggagcgaccaccgcaattgcaagaatcgccgtgcctttcagccaatccttgtcatctcgtttccagtggaatgctcgccaaatgaaccatatcagcatgggaatctcatacagcgacagcaatggcaaaccgatgaaaaccaggtcgaagcccgcggcgcaggctccatcgcatcccatcatgaagaagtcctcgccgttgtgtttcagtgcgtttggaaataacggtttacggcgtcttcgagctgctcaggttgctcaataatttcgtaggcaccgtgttcctccatctcaccggccggagcgtagccccagcggcagccgatagcgtccaaattgcaggcgtgggcgccgtcaatgtcggtgtagcggtcgccgatcatcacggccctgtcccccgctgcagcatcaaaaccgattttgtcgaagcagtaccgaatcacctgatctttgtccagacgggaattgtttttggaagcaccatagatgccgtccaacagttcggtcaggtggaaatggtcgcagataggcatgcactggtattcgggcttgcagctggccagtgccaggtagtaaccgtcggcatgcagtttgagcagctgttcacggatgcctgggaatacgacgttcaccagtcgtccgggcaccttgttgccgggctcgttcggatcgtcgaacacggcacggtctccgtagtagctgcgatagatgtccacggcccgatccagatcttccgcaggcacatgattgcgacgcagagattcaataatcgccggtccgatgaagcgtcgcagttcggcggcgcccggaaccggtcgaccgatctcttcgaaggtcttgatgacggagccgataatgccgccgtcggacttggtaagcgtgccgtcgagatccaacaggaccactttcatcggatgctgtgccattgagattccactcccccttgttcatgtcgactgctttgaatggtcgtcaaacaatgcgacttgttccaacaatgattatgcccagtcgggatgactgggcatcaagttcacgtgttgttcagtaggagatcactcgtagtcgggaatccaaccgtcacggtgcatttgcaggcgcttttcgagcagggtggccagttcctcttcgctacggcgttccagcagcatgtcccagtgggtgcgggtgggtttgctgatttcgtcgccctcacggtcggcgtcgccctcacggtgggccacggaaccacaacggcactcccactcgtccgggatttcggcaccctcggcaaacggcaggatggtgcggtggcccttcgggcatacatacgccacatcgtttcgcgcggcgaaatcgacgttgtcgtcggactccagcgatttcgctccgatgctcatgcccctgaggctacgttctgccatatcggcatcctccttgaaagatctttaaccctactaatttacgcaacagttcggacttggccgctattccaagcttccgacgtcggctgacaaactcccgtcaaacagccccgtcagtccacgccggagtaggccaccacgccacgattgacccggtcggccgcttcgtgggcgaggcctgccagccgctctcccccgtcgaacggcagcggctgggcgacagcaatctgctgcagcacgtcagccagtcgtttggcagtgcgcacgaagtcgccgccggtcatgtcggtgccgtacaggcacgatcccagcgaaccgccatccgcccattcatacatgatgtcgagaatgccgaaatccggccgctgcatctcgtccagaccgtgatcctcgcacaggatatcgatgtcttcacaaatgcccttgagcttggacgaagcgatggcgatgggcccggagatgccgcccgggtagtgcctcggttcgccgtctcccccgcgtctggcctcgtataccagtgaagagagcacagcggccagtccgttggcgtcgagcttgtcgaacgtgccggcgagcagcgcctcgcacagttccaggtcatgttcactgtagatgcggcgcagcagcagacctttttcagtcaacgtcatgtcaatgtggccggccgcattgacatgacgttcgaggtaaccaagcccggtgagaatatcgcagatgcaatcgaactggcgtgccacggacccggtgcgggagtcgtagcgatcggtgacgcgctgcagttctcgagtctcgcgggcccagcggtggccccatttgaggtgttgctggaggtccgggcagttgcggcatggatgctcgtgttccgccttgcgcaaatcgcgaatgcgctggtcgaggttctggaaagcgcgtgaacgctcctgatcggtcaggaacacttcgtgcttcagtttgcggcggccttccttttcgatgtcgctcagctccatacgcagggtcatgaactgtttgaagtcgccgtgttcgcatgcgaacgcctgttcgtatccggccagcgcgttcttcagtgtgttaatctgcgattccagctgccaggccgattcgttggcctcccactgggcaaacgactggtccagggtgacgcgcgcggtctcgtagtcgctggagttgagcaggttcacggccatgttgaacgtgggtcggaagctcgagtgcagcgggtagacacgcttggatgacagcgaggcggccgtggcgggcacaaaaccgtgatggtcgaccacgatggcgtggccgatggtgtcgatgccgcgccgaccggcacgaccggtgagctgcgtgaattcgccgggcgtcaggcccacatgaccggtaccgtcgaacttttcgagtttctctaccaccacgcagcgggccggcatattgatgcccaatgccagtgtttccgtggcgaacaccattttgaccagaccttcttcgaacaatcgttcgactatctgacggaacagggcaatcatgccggcatgatgcgaagcgaagccttcttccaatgcaaagcggaacttggagaactgcagggctttcaggtcttcctgagtgagttgcccctccaccatctcatccacgatgcggcgaatcctggtcacttcctcatcggtggtgagctccagtccagcgttgatacactgttccacggcctggtcacagccgttgcgcgagaagatgaagtagatgccgggcaacattcccaggaagttaagctcgtccaccacggcccagcggcgcggggtgtggcgttccgctttcggggcacggtctttggcgcctttgccgccgcggcctctgccgaagcccttgcgcttatcggggcgttcctcgccgcgccggcgtgcggccttgcggtccaactggtcgagccggttgatgagttcggcgttgagtttggtggtctgctcgccgttgccgtcgcggcgatagaggtccagcacctcgggctcggtgtgttcgtccgcctgcacgatgacgtgctgttccaaaggcacggggcggtgttcgctgatcaccagttttgtgtcgcctcgcaccgaggcaatccagttggagaaatcctccacgttggacacggtggcggacaggccgacgatcttgaccgtcttgggcaggtggatgatgacttcctcccacacgggcccgcggaatcggtcggccagatagtgcacttcgtcgagaatcacgtagcgcagtgcgttcagcgtggtggaacgctcgtagagcatgttgcgcagcacttcggtggtcatgaccacgatgtccgcctcggaattgatcgaggtgtcgccggtgagcaggcctaccttgtccgggccgtacacgtcgaccagatcatggtatttctgattgctcaacgccttgatcggtgtggtgtagaaggctttgacgttgcgttcctgggcgaggtaaatggcaaaatccgccactacggttttgccggcaccggttggggccgcgaccagtacgttgctgccggcttcgagcgcgtcattggcttcggtctggaagtcgtccagttcgaaaggcagggattcggcgaatcgcgctgctgcggacgcccgatggcgttggaccttttggaatgatgcgtaccgctgcgaagggctcagcgtctgggaatcggcattgcccttatggtgttggtgacgtgccattgctgctttctgttagttgttgaatcgcttccagcgggcccatgcctgggtgtggcgttcgcgcttggcggccttgctgcgaatcacgttcgcatgggcctcggcataacgattctgtgccacgctgagcggctgagtgaacagaggcggctcgctggtgtcggcagaggtgccgggctcccccatcgcggccacgcgttcaccgagttggccgccgatgtcggacatgtctttcaaggcacggagtccatgaagggctgcatagatgagtccggcaacaatcatggccagcatgaacagggccagaatcagccatatccaccaaggcatgaaaggctccttacttgttctcgctgatgctcagttcgcgttcggcgcgtgccacgatcatggtgcgcaacgtttccggggcgaccgccgtgatatgacgcgcgtgggcgatgcagaaggccacgaaccaggaatcggaggaaacggtcagatgcaccttttcaccggcaccgcattgttcgacggtagcgcccggcaatgtcttgatgaatgccagatcgcgctgatcggtgatgaacaccgcgtcggtaccgttgtcgaaactccacttgcgcagttcgctcaccggcatgttcgggatgttgatctgcttggtgggcttgaccagttccgccttttcgatacgggccaatcgcagtacctgccagatgcgcggcttgccgttggccttgtcgagggtcttgtctttggagacgtaggcctttttgtccttgggtgcggcggaaccaacgtccgtgtagacggcggcataatacacgccttcgtcaatgaagatcttggcgggggccaccagcttgcggcgggtacgacctgtaccgtcggtgtactccatgtccaacagcgaatcggtgttgatcgcacgcttgacgatggagaagcttcggggctccagctcatagccggtcaggctcagccacggggtctgaccgggactgacatgacggcgcaaacgctcatacagggattcggcctgcccacgctgcttgtccggcagcaacggcgaatgcgccaggtagctgaccgaggcggtgagcatgctgaggtattgcggcgaaatgccggcaagacgttcaaggcccagcgaattggtggcggaaacaataccctcggcatccagcagcggccagtcaatatcgaagaactggctgccggccatctcaccatcgtcggaaacggtggtcagggtgttgatgtccttatggatgatgttgacgaatttcttgagttcatcatcgttctttggcttgccgataaagcgttcgcccagctcgctcatcgagaattcctcacccagatgagcggagaggaacagcatcagacgcaggcgacgatcaacctcactgcccgtttggaaagcggagccgttcttcttgttctgagccttgatagactcgggatcacccggctctcgcacatcgcgactaatcgacggggaaaccaccgaagcgctcacaggactggcggattcgtcggccagagtgaaccggctggcggcgtgcaaacggcgatgataagcgtccacagcctcttgcgggctgacaatcgtggcccccggatgctcaagcacaaacatggccaaatcgtcggaatcggtgtatgccacgttcaggtgttcgccatccacgtcaacggtggcggcgaaacgacgcgaatcaataaccttgaccagtgaatccggaatgggctgcgtccccaagccaggcgcaatcgaatccaagccaagcccgggaatcggggtctgcggcacacgcggcgtagtgcgcgacacatgctgggtgagctgggactgatccggctcggaagaaatcgacatcgaacgagccagatagttggcggcggcaagcaccggcatatcttccggctcgaacatcaggcggatgcgcggttcgtcgcccaactgcagacgataggacgcgaagtcctggccttccgacttggacgagtactcaggctgccgtgattcgatggcaatgcccatcgcagcgagcttggcgcgatcacgctggaactgcttggcgaacgcggccttggcggcctgatctgccagctctccatacgagtcggcgtaagccttgacgcgctgcgcaatttggcgggatgtgagccattgcgggaacgcggatgacaacacagccagtacgtccagctcgtgcttgccccatttgtcggaaaaacgccgacgtccgcttgtgccctctgccattagtcctcacgtatagttattgtttcgttataagtgcgtatgagtttccccacactcactctatcttagaggctttttccacagttgagcgccatttcacaaaaataatatcttttttatcgttcgaccgtgttgtaaatcacacccaatcgtccggttcgatgccttgcgggccaacgtattcgccgttcggcacgtagctcggctcacccttatcttcaagtttggcgtcggcgaacatcatgacgtcacgtccgaatgtccagtcgccctgaatggaaaccgagttggctgcggccaaagatggcacggcgtaggggaaccgttcgtcgaaatcgcggatgttcttgtagtatcgcggatcaagttcgacgttcgggaagatgtaattgccgtcttccatctcatacgtgtccgtcaggtggaagcgatcggaacgcataatgaacaaatcattggtggttttcaccggaaggaagcgcatacgatccacttggacgcagatagaaccgttgaacagaccgattgcggcacccatggcggtttccagctgaatcacctgttcggagttcgggtccgtgggattcacggtctttttgttacgaatcaccggcaacggcaacacaccatcgcattcggcgagcttgtctttcaaagcgtcgatgcgaatccagatcgagttggtgttgaagtaaggatgcttggcgatgtcttgggccgcttccttatcatccggatggacctggctcatttcacgcagtatcaggcgaccagtggccttgtctcgcacgatatggcctcccttgcgatcggccttggtgcggatagccacttcggccatgaacggggcacctgtgttttcgaagtgctgggccaacgtacgagaggggcgtgcaccgagattgtcggaattggagatgaacagatacttgaagccgcgctcctccaatacgtcaagcaggccggactcccagatggtggagaacaggtcgccgtggccgggcgggcaccattccagctccgggttcatggggtagctcaccggttcgccggtggcggccacgagtttgggttcctgatgctggatgatttccatcggcacgtcatgctggctgaacttgcgatgatgcttgagcgccttcatcgtgtccgccgaagtgcggaaagaattcatgaacgtcagcggcagttcgacgtccaggcgggtgcgagcggtaagcacctgaccgatgatgatgtcgatgaagcgcatctgcttggccttgtgcctacgcaccggcaacagcgacttggccttgtccaatcccatggaggtgcccagaccgccattgagcttgaggaatgcggtcttggcgaaggcgtccacggccttgtcgtggttgatggtctcatagacgtcgtggaagctgggcacgtggccaagcggctcgatgtcgtcctcacgaatccagctggaggcttcttcatggcgccatacgtcatacaaatggcggaactggttgatggcggtttcgctcatgccgtgctcgcgcatcttggcggccgaaagctcgaaagtctcatccacttcgggggtgtttacggtttcttcggggatatccgaggtgacggcgtcggtgtcgtcagcggcggcgatatccagttgggccttatcgtttatttcggtcaattcgggtccctttcatcaaatcaataggaaccagtctagcccctgtttggggcaaacacatacgacggggggcggaggcggtgaattgtcggtgataattccaataacacgccaagatgaagtccgtgtttaatccattacgaatggcttacaaaggtaagtccgtcgtcatgttgtctcatgttgtctcatgttgtctgaaaacggaaaagccccggaaggcaaccactcagaagtggcggaattccggggctaatcggtcgggccggcgggatttgaacccgcgaccccttgacccccagtcaagtgcgctaccaaactgcgctacggcccgatggtgcaaaagcaccgagtagataatctaccagatatatgaaatctggcaaattacgcgcgtgtcacttccgctttttcttctcgcggatgttcacggagatctgaatcggcgtgccttcgaagccgaattcctcgcgcagggagcgttcgatgtagcggcggtagccgtgctcgaggaagccggtggcgaagatcacgaaacgcggcgggcgcgtggacgcctgcgtggcgaagaggattcgcggctgcttgccaccacgcaacgggtgcgggtgggcggcctggatcttgccgaggaaggcgttgagcttgcctgtaggaatacgctgatcccaggattccaaggccttatccatggctcgcgtcagacggttggtgtgccaaccggtcttggcggacaggttcacacgctcggcccacatcacacggtcgaattcggtgttccacaggcgttcgagacgctgcttgtcgaactcgtccatcgcatcccacttgttgaatacgagcacgattgcacggcccgcatccacggcggtggacatgaccttcaaatcctgatcggataccggctgcgaggcatcaaacagaatcagcgccaattcacagcgctcgatggcggcctgcgtgcgcagagaggaataatattccgcgcctgtgagcttgtgctggcgtcgcttgatgccggcggtgtcgatgaacagccagtcctcgccatcgatgttgacgatttcgtcgacggggtcgcgcgtggtgccggccaaatcgttgacgacggcacgttcttcgcgcgccagctgattgagcagagacgacttgcccacgttcgggcggcccaccagagccacgcggcgcaggccggaaggcgtgaggtagccggaagtcttctcggcctgcttgagcttgtcgagcgcgacgtccagcaggtcgcccactcccctgccgtgcatggcggaaatcgagtatggttcgccgaggccgagtttccagaattcggcggcaaggtattcgctggcctggtcgtcgatcttgttgacggccagcacgacaggcttgccggcggcacgcagcatcttgacgatgcgctcatcggtggtggtcatgcccacttgcccatcgaccacgaataccacggcatcggccaaggtcacggcaatctgtgcctgtgaggcgatggcggattcaatgccttccacgtcggcttcccagcctcctgtgtccaccagcttgaagtcggtgccggcccattccgcgtcatagctcacacggtctcgtgtaacgcccggcgtgtcttccacaacggcggcacggcggccgaggatacggttgaccagggatgatttgcccacgttcggacggcctacaacagccagcacgcccaccggcttgggaccggccttgcgcgcgccttccgtgaaaccacggccggaaatcagatcctcatcgccttcgtccagctcatagccttcgagattggcggcatactgctcgtattcttggttctcgatggcgtcctcgaccacaccgatgagcagatcgagcgtgtggacgaagtccagatcggaattgtcgatggtggtaacgccatcggcggcggtcaggaagctggtgaccttggaatcggccttgtcgcgcgcggccacatcctcagcgcccacgcccttgacagcctggccggtgcgacgggcctgacggacctcctcacgggcggtcagcagcacgcgcacctcggcgtccggggacaccacggtggtgatatcgcggccctcggccacgatgcccaaccccccggagaaggagtcggccgacgcctcgcgggcgatgtaggcgcgctgggcggcgatgagcacgttgcgcaccgggatgacgttcgacaccttggagacatggctggagacttcggaggaacgaatggcctcggagatgtcctcgtcgtcggcgaatacgcaggggttgtccgggtccacggagatatcgaaatggtcgccggtgaagaactcgcccaccgcttcggtgatgacacgctcatccacggtttcggcgtccagatcgatgccctgcttcaggcaccaccaagcgcaggcacgatacatcgcgcccgtgtcaaggtaggcgtatccgaaatacttggccagcgccttggacgtggacgacttgcccacgccggcggggccgtcgatggcaacgcgaatcacaggccaacctccttggacagcgaacggacttccgtctgggacagcacgcggtaggaaccgggcttcaaatcaccgagtttgatcgggccgatctgggtgcgcaccaagcgcttgaccgggaagccgattgagccgaagatacggcgcacgatgcggttcttgccggagtgcagcacgaccttgaccatcgtgtggtcgcgtgaggagtcgatgatcgcgcagtggtcgagcttgatccagccgtcgtcgagctgtacgccggtggtcacgagtcgacggcatacggtgccggagatcttgccttccagtgtggcgacgtaggtcttttcgacctcgtacttggggtgcatgacgtgctgcgagagttcgccgtcgttcgtcatgaggataagaccctcggaatcgtagtcgagacggcccatgtggaagatgcgctcgtacttgtcgcccacgatgtcgcgcaacgtgtagcggcccttcgggtcgtccatggcggagagcaccttgcggggcttgttcagtgccagagtgacgtggttcggattgacgcgtacgcgcgaaccgtctacgcgcacctgctgcttatgggggtcgacgcgagttccgagctcggtgaccagttcaccgtcgacctcgacacggccttcggtaatcatgtcctcgcacttgcggcgggaaccgaatcccgcttgggcaagcagcttctggagtcgaatggaattggaatcgtcttgcgctttcgcagcgcgggaatatgcgtttggcatcgttctcccaacgtggccggacagactctgtcatcgcagagactgtcgatttgtatacatacttcagagttggcggactggaatcccagccaattccaacctatatatcataccgcaacgtaggactgctgctagactggcaaccgtttgtacgggttcgcccgtcttccaacagatgaaaaggaatgaacaatcatggaagaaaccaagcaacagccgctggccctgcgcgtgtgcgccgaattggccggcagcttcctgctgtgctttgccatttacgccttctccacatggggttcggccgtgtatggcatcaatatcgtgttcttcgcgttggctaccggcttggcatatgccgcagtcaccgccatcttctcccgcgtgtccggtggccagctgaatccggccatcaccgtagcctccgtgctggtttccaagacgaaaatcctggatggcatcctctatgtgatcgctcaggtcatcggtgccatcgccgccggcttcgccgtggtcaagctgctgcccacatccgagcaggtagctgccaaagtgtggctgactccggccgttaacggtttcgagaacggctccgtgtcttactcgctgctgacccagtatggcatcacgttctcgattacgctggcgattgtcgtcgaggtcgttgcctctctgattgtcgttgccaccgccatgtcttctctgggtgatcacggcgagtcctcggaccgtcatgtcattgccatgggtcttgcctatggtctggccgccgccatcagctacccggttaccggtgccggtctcaatcccgcccgttccaccggtatcgcactggccgcgatgaatgagggtcttacgcaaaatccgctgcaacagctgtgggtgttctggattagcccggtcttggccgccgctgtggtggcgttggtcatgatcatcgcgcagatgatgaccactcccaaagtgccggctgccgccgatcttccacagacggatgccgatgcgaacgcggacacgctcgacgatggcgaattcttcgatcaggccgcctcgtctgatggcgattcagcggaaaaagatgttgccgaagagtccaaagaagctgaagtaggtaatcagcaggccgattcccaaggcgatgccgatgaaggagtcgaacgccactgagcgcactttccatgggcttttgtcctgaagaatcaggcgaacaagcccggtgatgatggccgtcacggcaagtatgaccgtggcggccatcgtatatccgaaagcaaccagcagtgtgatgacggcgacgacgccgagtacgcaccattcaaaccatggcttgccctcatgcgcttcggatacatagggatggttgtgcatgttgcgattccttctgtcgaacggttacgtgaccacaatagcaggcgaatagcaaaggtgggattccgcttggacccgttgacgggtcaggcggaatcccacctttgtgcgttttggctgagctgctcccctcagagagtcccgatcagtggaagaagtggcgggtgccggtgaggtacatggtcacgccggccttcttggccgcttcgatgacctcctcatcgcggatggatccgccgggctgcacgatggccttgacgcccgcgtcgataagcacctgggcaccatcggcgaacgggaagaacgcatcggatgccgcgaccgcaccggtggcgcgatcggcaccatcggccagcgtgttggcgcgctcgacggccagatggcaggagtccacgcggttgacttggcccatgccgatgccgaccgtggcctggtcgtgggccagcaggatggcgttggacttcacgcagcggattgcacgccatgcgaacacgaggtccttcagcgtgtcggcgtcggcggcatcgccggccacgagcttccaggcgtccggattgtcgccgacggcgttgatcagatcggtgtcctgcacaagcaggccgccatcgatctggcggatggcctcgtggcccttcggtggctcggccaccttgaggatgcgcaggttcttcttcttggtctgcagcagttcgagcgcggccggctcatagtcgggggcgacgatgacttcggtgaaaatcgggcgcacgctttcggccatctcaagagtgaccttggagttgcaggcgatcacaccgccgtaggcgctcatcgggtcgcaggcgtgagccttcttgtgggcctcggccgcggtcgcgccgatggccagaccgcacggattgttgtgcttgactacggccacggcaatggcgggagccatatcccatacggtgcgccaggcggcgtccgcgtccacgtagttgttgtagctcatcggcttgccgccgagctgctcggcgtgggcgaaaccggtctggttgagcgggtcaatgtagagggcggcctgctggtgggagttctcaccgtagcgcagggtgtgcgcacgatcccaggtgcgggtgaactgggccgggaacttggcggaatcgacttcagtgccctgatcgtccttgtccacctcgacggcgtccagagaggccggcttgggccagtgcttggcggtccactcgttgatggtggcgtcataggcggcggtgtgcgcgaaggccttggctgcaagccacttgcgctcgtcgagggagaagccggtgccatcggccacgcgggaggcgaccagtgcataatcggccgggtcggtgacgatggccacggtggcgtggttcttggccgcgccacgcaccatggaggggccgccgatgtcgatcttctcgatggtatcggtctcgttggcgccggagcgcacggtgtcggcgaacgggtacaggttgacgaccaccaagtcgaacggcttgatgccgaactcctcgagctgcttggcatgctcggggttggtcatatcagccagaatgccggcgtgaatgtacggatgcagcgtcttgacgcggccgtcgaggcattcggggaatccggtgacatcggacacctcggttaccttgacgcccagctcggcgagcttcctggcggtcgaaccggtggaaacgacttcggtgccggccttcacgaacgcttccgcgagtacttcgatgccttccttatgaaagaccgagaccagtgcccgacggatcggtcggttcgtgtttgtcatcctgttcctccttggattcttgtggttgtgacgccagggaccgcgcctgacggacgatgacggtcttcggggtcgcggcggtggtgcgggaatcattgatcctcccaaccaaccagcctatcgaaaaaacgagcactgtgccaatcagcgcgagcagccatgccgcggtaaatcccaatgcggtcgaatgaccgacgactctggtggaggccatgacgtcgacgccaatgtgagcgagacgatgatcgccaagcgatccattggacagagcgaacagcaatgtggatgccagtgagatcagcatcgcgctcaggcagaatgacccggcggagtagatcagcgaaaccagtactgggccgcgggtggacgcattccgtatattcaacggtctgcaggcgaatccttgcggtaggaatacagccagcaggcccacgagcgcagcgatggcgagaggcgcgttcaaggcaacggtacgccatagttcgctgctgaccggttcgggcagaataccgaataccggtattgcaggaagctctttggattggccgagccataacgtgaaactggccaaatcaccgatggcgaatccgccgccgaagagccaggaaacagcccagagcatgacgttgggtagccagatcagcatggcgacggtggtgagaattcgtgaaccggtttccatcccggacaattcgaacaacgatacgacagcggcatggttgcgtaccgaccatacgatgacggtaatcaatccaattgtcaggtatatgcccagtatcgcgacggccaagacgacgccgattttcaggcagtggcgtatgtccgccggcacctgcttgcgaatccagtccctgaatgctcgcatcttggctgattccggtacggctgcgcataggaaaccgatcgagaatacgatggctgctttcagcaacaccagccactggtcatcgacaagacctaggtgtacggattgccggaatgcctcgttcaacccgagccaaacattcaatccggcaacatacgcatgcggcccgtatgctttgattcgcatggtgagtgcattgatcagccatatcagcagtatggtcaacatcaatggcgtgatggtgagggtgaacgaatcggttctagagcccgatccctcgctcagaagcacaacggcctgtgtcagcgaggttgtgccgacggtgagattgtcgccgccctcttccatggagacaaccaataacatcagcgctgtatagcaacctaatgcaacggcatagatggccatggatgcgagggcgactatggctccccgcacccattggcgaatcacggctttcatcacgattggttggaaccgatcagtcgatgttggccttggcgagtatgtcgcgcatgatttcagcggcctggcccggggtcttgcccacggggatacccgccgcttcgagcgcgttcttcttgtcctgggcggtgcccttgcctccggagacgatggcgccggcgtggcccatctgcttgccttcgggggcggtgaaaccggcgatgtaggcgacaaccggcttggtcatgtgctccttggcccatgcggcggcgtcctgttcggcgaagccgccgatctcgccgatcatcatgacagccttggtgtcggggtcggcttcgaatgcctgcagggcttccagcagcgtcgtgccgacgatcggatcgccgccggcgccgagacatgcggtgaagccgatatcggacagttcgcccatgagctggtaggtgagggtgccggatttggagaccagtccgagcgggccgcggccgacgatgccgtcggggatgatgcccaagttgacgccagggttgccgagcgtgatgaaaccggggcagttcggtccgatgatgcgcacgcccttcttgagcgccagttcgacgaagtatgcggaatcggccaccggaatgccttcagtgatgaccacgatgagttcgatgccggcttcgacggcttcgaccacggcggacttggcgaacttcggcggcacgaacaccacgctggccttggcgccggtggcttcacgtgcttcaccgcaggtggcgaacacggggatgtccacgtcggcaccgttcttggcaccggggaaggtgacggatgtgccggccttgcgcgggttcacgccgccgacgatattggtgccggccttgagcatgcgagccgtgtgggtcatgccctgatggccggtcatgccctggacgataacgggagcgccgtcttcgatgaacagcatcagcgaacctccttggactgggtcgcctcaccggcgagctgcgcggccttggctgccgcgccttccatggtttcggacacatggatattcggattgttggcggaagcgaggatatgcagaccctcggcggcggcgttgccatcgaaacgcacgacgatcggcttggaaccgccgagcttggcgaccgcttcgaggatgccgttggcgacttccacgcaggaggtgatgccgccatagacattgatgaacacggattcgacctgagggtcggacagtacgatctccaggctttcggccatgacggctgcggaggcgccgccgccgatgtccaggaagttggcgggcttgatgttggtgccctgttcctcgccagcgccggagacggcatccagggaactcatgacgagtcctgcgccgttgccgatcacaccgacctcgccgtgcaggtgcacgtagtgcaggccgtgttcgcgggcgcgctgttcgaaggggtcgggaacgatgagatccacgaaacgcgcccagccatcatggcggaaggaggcgttgtcatccaaggagatcttggcgtccaaggcgctcagctgcttggtggattcgtcatccgggtcgccgatcttggcgagcggattgatttccacgagcgtggcatcgttgtctttgaagcagcgccacatcttgagcagaatctgcgcggcctgatcgacgtccgcgtggtagaagccgatgctctgtgccatttcggtggcagcggccaggtcgaagtcgccgagcgcatcgatgtgcaggcgcttgacggcctccggatgttccttggcgatttcctcgacttcggtgccgccgttggcggtggccagcacgtcgaagtcgcgcgaggtgcggtccacggagatggacacgtaatattcgtgcaggatgttcttggcttcggccacaagcacgccggaaaccttgtgcccgtggatggtcatcggcaggatggactcggattcaagaatcgcctcgtcgcggttatgggcgatcttgacgccgccggcctgaccacgatgaccgatcttgacctgcgccttgattacgcagggatagccgattttgtccgccgcttcggcgacttcatgggagttctgggcaaagatggcgtccggggtgggaatgtcctgttcctcgagcagctgacgcgcctggtattcgtaaagatccatcgatccttccctgactatgtaattggtccggcatataactgtacacagtacatgccggaccttgaaaactaactgtacgttgggtgagacggaatctcaggccggcatcgcgatcagcgagctgctgggcttgccgccgagcttatccagaccgtcgagaccatcgagccgcatcacaaaactgaagcccaccacagtgccgcccgccttttcgataaggtcggcgccggctttggcggtgccgcctgtggcgatgagatcatcgacaatgagcactcgctcccccgcctgtacggcgtcggtttcgatttcgacgctggccgtgccgtattcgaggtcataggattcaccgatggtttcgggcggcaatttaccggccttgcgcacagcgatgaaacccttgcccagatgggcggccatggccgggccgaacaggaacccgcgcgattcgagaccggcaatggagtcgaattcgctcggggacaccggcagagccgtttcaagcgccttgagcagaatcttcaagcccttggggtcggcgagcactggcatgaaatcacggaagataatgccttccttgggaaaccccggtatggaacgcaccaaggacaccagatattcggcgtcctgttgccctaccttgctcaatgcgtcgatggtgatgtccgactgtgccatagtgctcgtcccttttatgcctttgcgatgcgatactcggatggtgctaccgaatcgaacagcttacttcgtcttggtttcgttgtcgtcaccggtctcgtcagcggtgtcttcctcggacacgacggacgcctcgatcggaacctgaccagcctcatcgttagccggagcctcggtgtcttcgtcgggcagcgggttgccgttctcgtcgacctcatcatcggacacataggccgggcgggtgtactcacgggcgatggcgttgaagccgaaacgcagcttggagccttcggagtcgatgacgatctcctcatactgctcgtcgacttcgacgaccttgccgatcacctggccgatggtgatgacctcggtgccgggctgcaggttgcgacggaagtcctgcttctcctgctgttgctgcttggccttcttggactgccaccacatcatgccgccgaacacgacgacgatcacgatgagcataatgtactgttgttccacgaaacaactccttcaaacgagcgacattgacgaaacgccgccaagtgtgcaaacaggagaaagtctagaagagcttgctgacatcatctttgggcgtaattcccaaatgctgccatgccttctcggtagccacgcggcctttgggcgtgcgaatcataaaaccttcgcgcacaagatacggctcgcacacggtttccacggtttccgattcctcgcccaccatggccgccagattgttcaggcccacgggtccaccgttgaagttgcgcacgatggcattgagcacggcgatgtccagccggtcgaggccttcggagtcgatctggtacagggccagcgcctccttgacgtcgtccggccgcaccacgatcaggtcgtggacgatggcccagtcgcgtacacggcgtagcaatcggttggcgatacgcggcgtgccgcgcgaacgcaacgcaagctcatgagcggaacccgcatcaaggtttacgcccagtacgttggccgaacgttcgatgagcttttccaactcctcatgcggatagaagtcgagatgtgcggtgaagccaaagcgtgcgcgcaacgggcttggcagcataccttcgcgcgtggtggcaccgatgacggtgaatcgcggcagggtcagcgggatggagcttgcgcccgggcctttgccgaccatcacatcgacgcggaagtcctccatcgcgatatacagcagctcttcggcggcgcgcggcagacgatggatctcgtcgatgaacagcacttcgccgacgtcgagggagctcagaatcgaagcaagatcaccggcatgttgaaccgcagggccggaagtcacgcgaatcggcacttcaagctcattggcaacgatcatggccaacgtggttttgcccaagccaggagggccggcaagcagaatatggtccggtggcacatcgcgtttgcgggccgcgtccaggaacagttgcagctgggccttgagccgtggctgtccgataaagccttcgagaacatgggggcgcagctcctcgtcgctgaccggctcgttgccgatcggctgggaggagaccatgcgcaacgactcttcgttggcaccggtgtttgaggtaccgtgatccgttgtctcgctcatcagcggcccctatccatcagcgccaaagccagacgtagcacacgcggcacatcgtcggtggcaagcggcgtgggaatatcgttttcggcgcaagcctcggcaacggcctgctgggcgtcctgctgacgccagccaagtgaaatcagtccttcgacaacctgttccgtaccggtatccaccggagacttggatattgccgcctgagcggaagcaccctcgatctgactcaaatcaatagagcccttaagctcgaggatgattttctgtgcgcccttcttgcccagccccggagccttggccagcgcggtggcgtcgctgtcggcgatggcgtgggccagctgactcggcgtcagtgtggagagtaacgattgggccactttaggtccaatgccggagaccttgatgagttgcagaaaggttttcttggcgtcccgatccaggaatccatgcagggtaatggcatcctgagagaggttcatataggtgaagacgcgggtgtcttgcccggcgtgcagacggctcaggtcggtggcggacatgcgcacttcgtagcccactcccccaacatcaatcaatgcggtatcggtttcgaccgattcaacccgcccggtcagcatgccgatcatacaggtactccttcagggctccaggattcaagactcgaacaactgttcgaaagtatactacatgcctcggtcgtggttgatgcggcggcgcgtggatttctgtgcggcctcagcccactggcgttgcgcggcggtcagatgttgttcgcgttcgccgccctgcaatgcgcctgccgggcgcagcgcatggcaaatggccaaagccaaggcatcggcggcatcggcgggagtcggcattttggtgaggttcaaaatacgtgtcaccatacgctccacctgaatcttctgcgcctgcccgttaccggtgatagccagcttggcttcggtaggcgtatgcaacgccacgggaatattgcgttgcgcggcggcgagcatggcgaggccggcggcctgtgcggtaccgagtacggtgttgcggttggattgtgcgaacactcgttcgatggatacggcatcgggtgcgaagcgatccattttctcggacaggccgttgtagatggccagtagacgcagatcctgggtgatatccggtgaggaccgcaccacgtccacgtgaataaacgaaagccggcggtgctcgccggcttcgatcacgccgaccccgcaacgtgtgagcccggggtcgacgccaaggataatcacgaggattactcctcgtcgagctgggccatcacctcgtcggaagcggtccagttggagtagatgttctgcacatcgtcgaggtcatcgaggttgtcgatgagcttggacaccttgcgggcatcgtcgaggctcaactccacctcgttcttcggctgcatgacctggtcggcggaatcgtagtcgaagccggcgtcctgcagagccttgcgcacggtgaacaggtcggacggaccggtcacaacggtgaacacctcaccgtcatcggtaacgtcctcggcaccggcttcggcggcggtttcgaacagcttgtcgaagtccacgccctcggacggcaccacgatctggcccttgcgctcgaagttgaaggacacggagccggaggtggccagggagccgttgcccttggtcagggtggaacggacttcggcggccgcacggttgcggttgtcggtaaggcattcgatgatgaggccaacgccggcaggagcgtagccctcgtagacgatgtcttcgtagttggcggcgccgtcttcagcaccggcaccacgcttgacggcacgagcgatgttgtcggccggcatggaggccttcttggccttgtagatggcatcgtacagggacgggttgccgtccgggtcgccaccgccgaggcgggcggcgatttcgatgttcttgatgagcttggcgaagagcttgccgcgcttggcgtcgatggcggccttcttgtgcttggtggtcgcccacttggaatgacctgacataatgctcctagcaattattgaaacggatgatgtcaaacgaaacgattgtaggccgttaatcagacatacccgtgatgtttccgatgattgtcttgttatgcgtaccgataagaccggtcacgcggggtgccgcacctgtgttaggcaagcggcagatgatactgcggagccagctgttcgaatgcctgggcataggcttctcgctggtcggacagcagaataggcatggtgcgtgtctgggcgacgatgggcatgaagttcgcgtcaccattccagcgaggcactacatgctgatggaggtgagcggcgactcctgcgcctgctacttcgccctgattaatgccgatattgtaaccgtgcggacgggagacggtttccatcaccttcatggcgagggtggtggccttctcgaattcgaacagttcggcatcgtcgagttcggtgatgaatccgacgtgacggtacgggcagatcatgagatgcccgacattgtatgggtagaggttcatgatggcgaacacgtgcgtgccacgccaggcgatgaggccgtcttcgtcggatttcttgggtccggcgcagaacgggcattccttcgtcttgggcttggttgggcgatcctcgctgttgcgcagcacataggtcatgcgctgcggagtccacagtcgttcgaccgtgtcctcctgaggcggaaagtccgccggattatcgacacgcacgtcagtcattttcgcaccctttcttggctcccctctctgaggggagctgtccgtgaaacggactgaggggagtgcgagccatgcaggactcccctcagtcgcctacggagccagctcccctcagagaggggagccagtaccattcacatcactcagccacagcggcgttgaagtcgtcggcggagttcacctggacgcgcttcttgatgacggtgaggatctgctcgcgggccttgtccaccggaacgccgttgagctggctgccgtcacggaagcggaagctgaccgcgttgttgttcatgtcttcctcaccgacgatgaggatgaacggcaccttggacttggaggcgttgcgaatcttcttgccgaagcgatcgtcggagtagtcgatctcgcaacggaccatctcgtcctcaagggacttgacgaaaccggccagatgcggggcgaactcgtcggcaaccggcacgccgagcacctgcacgggggccagccacgccgggaaggcgcctgcgtagtgctcgagcagcacggcgaagaagcgttcgatggagccgaacagggcgcggtgaatcatcaccggacgctggtgggtaccgtcctgcgcgatgtactcgagctggaaacgctcgggcaggttgaagtcgagctggatggtcgagacctgccaggtgcggccgatggcgtcgcgggcctgcacggagatcttcgggccgtagaaggcggcgccgcacggatcgtcgacgagctcgaggttggattccttggcgacctcggcgagcgtgttggtggcctcctcccagatctcgtcggagccgacgtacttgttcgggtccttggtggacagctcgaggtagaagtcggtcaggccaaagtccttgagcaggttcagcacgaaggtcagcaggctggtgagctcgtctttcatctgctcgcgggtgcagtagatgtgggagtcgtcctgggtgaggccgcgcacgcgggtcaggccgtggacctcgccggacttctcgtagcggtacacggtgccgaactcgaagaggcgcagcggcagctcgcggtaggagcgctgacgggacttgaagatcaggttgtgcatcgggcagttcatcggcttcaggtagtagtcggcgcccggcttggtgatgttgccgtccgcgtccttctcctcgtcgaggtgcatgggcgggtacatgccgtccttgtaccagtgcaggtggccggaggtctcgtacaggccgcccttggtgatgtgcggggtctgcacgaagctgtagtggtgcttgcggtgcatctcacgggagtagtcctccatcgcgttgatcacggcggcgcccttcgggtggaacacggccaggccggggccaatttcatccgggaaggagaacaggtccatctcggcgccgagcttgcggtgatcgcgcttggcggcctcctcgagacgggtctggtaggccttgaggtcttccttggtggcccacgcggtgccgtagatgcgctgcatggtcgggttcttctcggaaccacgccagtaggcggcggcggaacgctcgatcttgaaggccttgatgtagcgggtgttcggcaggtgcggaccgcggcacaggtccttccaaaccacattgccatcacggtctacgttgtcgtagaagctgagctccttttcggagatctcggtggcggcggccgggtcgaggtgtgcttccttgtcttcgatcagttcgatcttaaagggctggtcggcctcttccttcagagcctcttcctcagtcacggaacggcggcggaaggactgggaggacttgatgatgcgctgcatgcgcttctcgatgtccttgaggtcgtccggggtgaagggctggtcgacctggaagtcgtagtagaagccgtccttgatgacggggccgacgccgagcttggcgttcgggtagacttcctgcacggcctgggccatgacgtgggtggccgagtgacgcatgattgcgaggccgtcttcggagtcgagggcgatggggtcgacggtatcgccatcgttcagcggcgtgtacaggtcacggttctcgccgttgatcttgaccgcgatgatgttcttgtcttccgcgaacagttctacgccggtggtggttgcttccacctccttcgcttcgccgttgacggttatggagatggtagcttgcgccatgatttgtcctttgctatcggggcccacggtactaatgtgcaggcctggactggttaatcaacgtaggacacgataggttgggcgtgcgacaaataccaccagcatctgaaccaatacgaaaaaaacctcgccgaagcgaggtttcgttgtggagcggacaacgggactcgaacccgcggtctcaaccttggcaaggttgcgctttaccaactaagctatgtccgcaaaggaatccgccgtgagaagcggaatccagtgggcgatgtaggaatcgaacctacgaccccttcggtgtgaacgaagtgcgctagccgctgcgccaatcgcccgaatactcggttcttcagttatatccagtcgaattgcttcgactttcgtgggcgatacaagattcgaacttgtgaccccttccgtgtcagggaagtgcgctaccactgcgccaaccgcccgggtcatatttcatcccattgaattgcttcgctggtctgagaggtgggtacgagagtcgaactcgtctatacggctttgcaggccgctgcctaaccgcttggctaacccaccgtaaggtctgtcaactcacggacctagagcggacaacgggactcgaacccgcggtctcaaccttggcaaggttgcgctttaccaactaagctatgtccgcgtgtgtttccttggcgaggtctccctgccgaagcacgagtgtttactatactcacatgcgtgtagttcgtccagctgcggcgtgtcgcctgtaattgcatactctcgcttatggctaaagcgtgcgcttcgggcaatgaattccagttactctagaggtatgagtgaagcagcgaaggacaccggcgcagtattgatcgccgcattcgagggatggaatgatgcctgtcaggcggcgacgaacgcggtgcgccatctggtcaagcgatatgagtcccgcgagattcgtcatattagatgtgatgatttctatgactatcaggttgcccgtcctatgctgtgccatgttgcgggacgcaccaatcttatctggccgcagaccacgttctacgacatcacgttggacgcaggcaagcatatctatgcgcagatcgcccccgaaccgaactatcggtggaaggaatactgtagccagagtctggccattgccgatgagctggatgtcaatcggatcattacgttaggttcgatgttctccgattgtccgcatacccgtccgttgcccatcgccgtcagcgacggagactgtcaatgcgaaggagaccggtcgtataacggcccggtaggcattcctaccgttttggatgtggccgccgcgcagcaaggttttgctcattcctcgatgtgggtgtccatcccccaatatttgggcagcgacgaatgttctgccggcactatgcgattgctggatgcgttggacaagcatatcggcttcaccttcgatacggcagatctgaagcagaaagccgaacagtggaaggcgcaagcctcgatactggttcgttgtaatgaccagcttcacgattacgtggagcatttggagcacgactacgacttgcagcagaaagccgaggcggaggcttccttgggagcgccccaggccgaacaactagtcaaagaagcagaagcgtttctgcgccagatgggcaattagcccatatatggtgtgctcccgctggatgaacagccctgtgggctgttcatagcagtgcaccatgtgcacgtcgcacaaaatgtcgggagctggctcgcgtagcgagactgagggtggttctgctggcatattccagtgaccacccccagtcagcttcgctgacggctcccgccagcgggagcaccattatattggagtcgtctatcgacccgtcttatgccgcagccgccacggagggatcgatggccggcagcacgcccacaatcagcagcaaggcgacgaccacagccaaaccgatgcggtagatggcgaaggccttataggagaagttcgatacgaacttcaggaatccgatgatcacgatgtagccgagtacgaagctgatgaccatggctacgagggtcggcccccagccggggaacatcgcatcggttttgtagttcttcacggccttgatggcttcgagcaaacctgagccgaacaccgcggggatggccatcaggaagctcagacgtacagcggcctcacgcgtgtagcccagtgcgcgaccgacggtgatggtgccgccggagcgggacacaccaggaatcagcgccatggactggcccaaaccgaagaggaacgcatcacgatacgtcatatcattcatggttttgttctggcgagccttggcatccaccatccacagcagaatgccgaataccaacagcacggttaccgtaatccacaggttgcgcaacgaggtctcgatgacgttctgcagagtgaagccgaggatgataatcggaatcgagccgacgatgatgttccagccgagtgtggcgtaattgtcgccgcggcccatgcgggccttccaatccttgccgttcttgccgaacaggcagctgaaccagtgagtaaggatattgatgatgtcgtgacggaaatacagaatcaccgcaagttcggtgccgatttggatgatggcggtaaacgccgcaccgggatcagagcccagcatcaaatcgccgaaaatacggatatgcgcgctggaggataccgggagatactcggtcagcgcctgaacgatgccgagaatgatcgcttggaaaaaattcataacccctcgtgatttctaagtatttgatgtgttatgacgatgaacaccctacccaagggggtgtagaacaacactaagaatcggtaacatccacggcttctacaatgaaagtggatatagtacgtaagcgacgaagggagcattatggccacgtatcgcaaaagcagggcattcgcaccggaaggattcttcgaatgcgagggtcgaggactcgaatggttgggggcggctcatgcgcagggcggcccgcgcgtggtgcaggtatacggctggggcaaggattatctggatatcgaacgtgtgggcagcgcgtcccccacgcctcaggcggcacgagcttttggtgcggctctggcccatatgcatgatgtgggtgccgaatatttcgggtctgcgcctgacggatataacggcacatgctatttcggaccattgcaggacccagtgaaaatggataccggcgagtggaccgacccgatcagctatttcgctgatggacgtctgcgcccgatggtcaaccttggtgtgaggcgtggcgagctggataagcgcgatgtcgaactgaccgagcgcgtgattgaagcgttgccggatctgatgggccgagccgcgtccgacaagccggcgcgcatccacggtgatctgtggagcggcaatgtgatgtggaccgccgattccgggcagcccgaggctgtgctcatcgacccggcggcacatggcggtcatcgcgaggaggatctggctatgctgcacctgttcggcatgagctatctgagcgaaatcaccgagggctaccagtccgtgcatccgttgaaggccggatggcaggagcgtatcacgctctggcagctctaccccatcgccggccactgtgtcttcttcggcggcggctacgtcaacgaataccactccatgtgccgctccctgctgaagtaacagacttggctcccctctctgaggggagccaagaacgcatccactctcagctcagcgcgtccttcaacttgctgaagaaccaccattcacgggaatggcgtgattccaacgtttctgagggtttcatacgggctccaaaatgtttttgcccacattttgcccacatttttccatgcttgtctccacctgcaccgcagcatcgagcatacgggcaacatccatcaaatcgctgtcgaacagatccgcgtacacatccaacgtcatgctcgcgttcttgtggcccagcatcctctgtaaggccttgacgttcgcgcccgcgtgcacggccagcgaggcggcggtgtgacgcaggtcatgaggcgtgggccattcctccttcggccagcccaggcgcaccagcgcgtgataccaccagccggtcgtcttcgccgtgctctgcttcatgatcgggccgccccgcagatcacggaacaccctttcgtccggttcgcgttccccgcatatcggtttcagcgcttccatgacgatgagaggcatgggcacgtcgcgttcctcgctgttcttcggagtgtcctcgacccatcgtgccccgacgtacacgaggttgccgcccacatgcagcactccccgaccgaagtccaggtcacgggccttcaacgccgccgcctcgccccagcgcaacccgcagaagcccaatgtcagcacgagcgcccgccgctcctcccccagatgctttcccctggcgcattcgtcggcgaatgcgagcagccgggatatggtcaggtacacgcgacggctcttgcgcctcggcagcttggggagttcaacgttttcacaggggttgtcgagtatgagcctgtcccgcacggccatgcggcagatgccgagcatggtctggtacgggcgtctcacggatggagcacccgagttctcgatgatgtcgctgatccatgcctggacttcggcgcgggtgacggtgccgatccgacggtcggcccatcgagcctcgcagtggagcctccatgcgtcggtggcgttgatccgcgtggtctccttccaaaacggccatttctccttcagccattgctcgtagaggtctccaacacgtcgtttgccgtcctccgggtcaacatagctgttggtggccttggcgatggtgacgtgctcggccgcccagttctccgcgtcgatcttgcggcggaaacccctcttgtcggtttgcgtgccgtcgggtttccggtagcggacgcggtagcggttttcgccctttgaggttttgtatctggtgacgttcgccatcagtccacctccatgctgtccacttggaatctcagggttggtcggatagtatgcgaattaaaggaaaggtatggtcgatggataatgagcaacaatccaatcctgaagggcatgacgaggggcgcgcaaatagtagtgactcgcaaggtggagcggaggtcgttcacgccggcgacagcagtacagctccagacgaaagcctgggaaatggtgggcgacagcctgcgcagagcgatggacaaggaatcgacctcaacgcgatagcgattgcggcacgctctggcccactgccttccgtcgaagaatacgcaggttatgagagggtacttcccggtgccgctgatcgcatactggccatggccgaaaaatcgttggacgtcgagatatcggacagaaaagcagcaacagcaatggaggccgctgaccataaggccgaaaacctcagtatgctcattacttccgttgccttttcgttcctgccttggatggcctttggagccgctatagtttgcgcggcctttggaaacaatgtcggtacgttcattggaagcatagttggcgtcttttccgctggtcctcagcttattgacgccgtaaaacgtaaacgcaaatagcatttcgggtatgcttcgccccgtgtaggataaggggtgaagcgtcctcctttccaataagcaagctggtcgatgtttcaaccgccctgttgacgctgcaacgccgacagggcattttttattgtttggtggttttgacggtgatggtggtgccgagcgcggtggtctcccagctcacgccgtcggcctcgctgtaggtgaagtccttggtggcgtcctgcgaggcgagcagggattgagccatggtctcggtgtcgccctggctggtccacttccagtcgccggcctcggtcggggcctgataggtgcccttccagtagaggctcttggcgtcggtgccaatccagttgacctcgatggtgtcgccgctgatggtggcctccatgtacgagttcgggtcgttggagttggtttgcttccacgtgccggtcaggtcggccggctggggcttgggctcctccttcttggtctcggtctttgacgtgccgtccgttttggccggcgcgtcggatgtggtgttttccccgcaggcggtcagtccggcgagcaacagtgccgctgccagcagtgcgattgtctttttcatggttttcttctttcttagtggattatctcgctgaggatttgtctgtagtcttcgatgacttggacggtgacgttgagctcgctggccatttggtggggttgccgccgtacatgcgttccgccagcgcgtactctgccgggtcgatgagcagcagggcggtccgccgccggcaacgccgttcgatccgactgccctcgcaccctttcgacgtgtcgtcgtcatgcgcccagtggacgagctcgtgcaccagcgtgcagcgtttgcgcgtgtaggtgatgcgccggtcgatcaggatcgtgtccgctccctgcgatagagcccgtccagcctgcggggcaggagggcgctggccacggtcagaccgggcgcgaatccgtacaacgccatacgcatctgcccgtagctcaacgaagagcttatcagcagtcgggcgctcatcatctttctcgcttcctctcaaggaacatgtccaaaaacgggatctctcagcttatcttgtccaaggcgtgtatcgccttggcggcaagatcattctgggcgggattctccgtgaattcctgatatctctccttgctcttctcgaccatgtctgagaagtacaggaatcgcgcattgaagatgcgaacgcgatcgttcgcggcctttacaggcattatttcgtcttttatgtcgctgtacacgtgcttgacaatgattatcacattgactcttgcgtcaattcctgaatcgttcgtgtacgcatgcgagccagaaccagcccgcgcgtcagcttgctgcaacagccgcgtcattgcccgagcatatttctcaatttgcagcgtcagttcgcttatcttcaccttccttccgtatcgtttgaactcgacgatgacttgtcgtccgcctccgtccaggtatttgatgtcgagccggtcgtcggcggcgtcgtcgctgaaatccagattgaattgttccttcgctatccttttgaaggactgttccttgacgaggtcttccgtcgcacgctcccatgacggatccaaaagccatgggttttccgcgatgaaatccctagtcctgttttcgagttcattgtggtccaacagatcttccagcttgccgatgacggaaagcctcgtcctgattatttggccatactccagttcctcaaatctggcatacgaggacagtatggtgaatagctgcgcctcactcatcgtgtcaacgtctttgagcttgtctatctcatcgttctgctgcagtttgtagaaggcggcgattgacgactgatacagggaattgcggtcgtcgtcattcaggccgtcaatgctggatattcgcgaaatcatcttctgtgcgggtctcctgcgatccgacggaagcgaggtaatccattccctgacctcaggaacgctctcataaagggctttggtggttgtatcgctcctcaattccgaccacttgtccgatgccgcgttgaatatgtccttcatcttcgcattgaacgcgcggacccgctcatcgtcctcgactagtctctgcctgtccgacgtggcaatgtcctcctgatcatcctggtccaggaagtcggcttggatctgaccggtgacatagcttgcgaaatgcttgtcaaaatcgaggtgatccaatagtccctcttggatcggcctctttctcgcgagaactatgatgttcttcatgctctcgtcgtcggcttcgaacaccctgtcggcgggcttggcaacgcttcctatccatccggagatacgccagtcatcatgccccgggatacttgtgtctttgatgcggttttcggcttcggcggacacctgcactccgtccggcagttcgtaatcccccagataccatatgtactgcagtttctggagatcgccgcgatcctcgtacgtgaccggctcaccgttgatttctatgacgaatcttccctgatcctcgggcaggttcgcaaggccgaggacgtcgaaacgcctcgccagcctccggcgcagggcccgttcggtaatggatacccgtttcaccctcagatcggaaagaacaattttcgtcccgttggcacggtcgccgaattccgcggcggcgtcggccagcggttccgggtggtactcccttcctgcgggatcggtgttgcggatactcttctccatttccttcgcgtcgatggtgaacccgtgagacgggccatcctgttttctcgaggaaacgaccatcttgtccgcgagggagaacgcggacagtttgccaatgcccttccgtcccatgtagggacgcttgaatctgggcgaagccatgccttccacgactcttttccggtatcccactgtcaggaaccgtgagttgagttccccgtcggtcatgccgcacccgttgtccaagatcgagatggaattattcggatcgaactggatctcaacgcgggtggcgtctgcatcccatgcgttggcgacgaactccgacagcactgctgccgcgttcgaatacaggttcctgcccagggaatccaccgtggcgatgtcgacggtcagcgtgtatttatcattcattatcctgattcctcttttccttttccactgcgacgatctggcgtgcgattgccttgccgaacacgggaggcaccgcgttgccgataagccgcccgacgttggtgaacgtgatgggctctcccggcttcgtgaacatgaacgagtccgggaatccctgcaggcgtgacgcctcgcggagagtcagcgtcctgtcctgctcggggtgggtgaatcgcccggtgccgggattgtaggactgcgtagtgatggtcggtgagggtttgtcccattccatacgtccataaaacgatttgaacgtggacccggtcgtttttttctggcattccagcagaagctcttccggccagtccttccatgtgcctcccggctcggaggcttgtatccgccggaggttcaatggagtgagattacgggcgaaatgcagccggtcgtccggatcatgctctccggcggacaatggcgggagatcctgaatcgcatcggagacggttctgtatgagtccttgtcgactgtcggggatgggatagggacgtctgttccccgtccggcgagcagcacaagccttctgcgccgttgaggcagaccgtagtcggggccgaatagcacggaatgggcgacctgatatcccgtttcccgaaggatcgacacgaattcctcgaagacctcggatttctggagtctgggcacgttttccatggtgacgtagtctggggtcgtttccctgacaagacgcccgaactccagaagcaacggccatgactgttcctgcgacgtgtccactccacgccgttgcgacgagaatggctgacatggcgcacatccggcaagcagacggacactggaacggccccacagtcgcttcaattcatcgcccgtgacctcacgaacgcttttccgcacgaatttggccttgatgttctcctcatatgggtaggcgcaggaagccgcgttgtctatccccgcaacgacacgcacgccgccctgtttcagaccgagcgacaatcctcccgtgccgcaaaacaggtcaatggccgatatcacagttcttgtcctcatgaatccccactataaacagaatcaaagagatcaatcacccatttacgcgggttcgtccccatcaccatcgaatttatgctcatcttctagggcgacgatgtccatgtctcctcgatggagtttcttgagtgtttcggccactcgagcctgctcatcatcaacaacaaagcgctcgccagcgggtttctttgttgatgcggtttgttgttcgagttccatacgtcttgcctcggtgatgatctcacgcagggtttgcaccgggtcggcgttgcagacctcgcaaatcagcaaaaactctgacaggcgcaccggagatttctctccattgtggatatatccaatccggacatggcttactactccgcccatgcgttcggcaattaccctatatgccaaagcggaatcatcgatgattttcgccatcgcattctttgcggcgtaatccgctgctgtccattcgatttttgctgccatggctcaaacatacgtgtaagcatgtggaaacacgccgcacttgctcaaattgtaagcgttagctaacatgagttccgtaatcacgagcttacagcggaggtggttgagatggcccagattgattacagggagcttccggtcagggagctgtatctctacatgaatctcgtgacgggtttctgctccgatatgcgtcgcctgttgcgcgaggggaagctgaccgccgatgcgattgacaagtacgagatgacggcggtcaacaacctgattgctgaggtcaactaccgatcgcttgcagagtctgagatacggcgagaccgagggcagggagctggacgatgaaatccgcaagcatgttccccagatacttgtccttgattgtctgccacttcgatttctcctgtgtggccgattcggccatgtacatggagccgaacagtcgttggagcgaatcgttgatgtcgaagtcgataccggcctcgaagttgtcgatgttcctgcgcacttcgtcgaccagtttcatgatgtgcgctttcaacgccggtggtagggaatcatccgatttgatgagctcgacgagctcgttcaggaaggcagtgaggttcttcgcccggtcgtcgttcaactcgtatcgcatggagaacgagcgatctgcaatcgtctgcaagctcagaatcgacgccggagacaatgtctcatcatgtttcggatgcgtgctgaagtaccggagagaaccatcactatacgcatccgcgaatgacttccaaagactttcccagatagcgggaagctgctgctccacggtgtccaatcgccgcacaccagacgctttgagacccgcgacaagacgttccgtccgcgccattgcgtcaaacgccgaacaagctgaatcatcgaagccctcgattcgcggttcgaccttgaagaacttcaacaggtattccgccggattcaccatgacccccaatcagctaaaggaacaagcacatgcctaatctaccagcagttgaagccacgaaacgtgccgtgcacgacacccgcacccgcgtgctcctgtccaaaaccaaaatgaccagcatcgccgaggcctgcggccgcaaccgcatgaccgtcgccaaatggctcgacggcgacgacatcagcctcgcagcatacatcgccgcacaacaactctcaggcggcgacccaatcgaaacactcaccaacgcgctcgccgctgagaacactattccagcgctcgccgaaggagaggtgaagtgatgggcaatgacatctccgtcgtggaactacgttcaatgaacaacgatcagattcaccgttttgccgcgctcgtcaacgaaccggaaaacactctggcgaacatgtcggacgacccggtgcgtatcgagacatacccgggaatcggcccgcaaatcatttcctatcggaaaatcgtgcgaattgacgataatgtgcttgccgccttgttcagtgcagatactgaggagacggcttcgtcaccgaatgacgctccccggattcacccggaagggaccaggtgattctgatgtcggcatacccgtcctcgcacataatcgccttctccatgaacatgaacccgatggacgatcccttggatatattccccagctcgtattccttgccgctcgaaagcaccacccgaacgtcatgggcatcaaaggcgttctcgttcgcgacggcatacttgaggttctgcacttggtatatgtcccacttcgggacactggcggtctcctcggccaaccgggcctgcatacgctgcgcggcaagctgtccacgcaacgcatcggctgaatcctcaaccgtcttgacctgcgcgcgaagcgcatccgccgaatcattcgcggccttcaattggcccttgagcacctcaagctgggcatcgaacttctcctgcgcatccttggcctcacgtttcgcggctttgccctccagacatttggacgtgaaccacgccaccggggagagcacgattcccagaaccgtgatcgccaagtccatccaggctgtcgggttctgcgcgaaatccccctgtatcagattccacaaccatgtgaccatcatcgacttctttctcataggagcattcatgatgaatctaccgcatcatgcgtcccatcgtcccatccgcaccgcaaccattccggcgctcgccgaaagcgaggtgaagtgatgactgtgttcatcagtgtcgcagccgcatcaaccaatctcgtggtttcgttcatcctgctgattgtggagctccacaatcgccgggaaatcagaagggtgtcccgttacgccgaagcacattatggaacaccctcgtttgcccggaacgtccgcgaacctacttctgagaaacgcgtttctggaagttcttgtattcatcggagccatcatcattgaccacgacggatacggatgattccgagtgcagagcgatggctatcgtgcctcccggcagatcaagcgatttattctcaacgagctcgaagtacaccactttccgctcaccgggcttcaatccctttatcgtctccacgatttcatcgaacagttcgatgacaccgcgaagagaccccggaaggacattgccgtcaacctcgacatagttcttggtcctgttgtccattttttcacctcctctcattgctggtagtacgcaatatccagcttagggggaggtgatccaacacgaaaaaaggaaaaaccaatgagcgagaaactcaccatcgcaaaccctgaggacgggaaccgtcccctttcctatcaggctctcagccatggcatcgatgaattgcgtctgggtgacatgggcatcacggacgcggtgtggcgcggcccgcacagcgagctcgtggccctggcccgtcgaatcctcgatgcggaggccggacgatgaacgccgaggattacggacagcacgcgagcggctacaggaggcccgagcccgacgaactgtctcgtggcttcacggtccggttgattctctgggccgtggtgttcgcctgctgcatcggctgggtgatgtctcacgccggttgcgcgcatcccatcggcaatggcatcacctcccttatgggattcggtttcgtgccattgcggctcctgtgcctcgttttgagcgaggcgggagtcgaataaaggcttgccggggttcctattctttccttccccggcaatcgacaaggacagtcgctaacaccattcgcgtcgcaccccatccccagcgggtgcggcgcacggggccggcaggttcgcccccgctggagatcgcggtgtcatgtacgcgcggcaaacagcgggaagccgttcgattcggcacggtccacgcccttcggggaaagaaaaagcccacgcggcaacgtgggcgaagcaaaacagctacaggagaaaggataccaccatgagcgccatgattccgcccgacatcgtccaggacggcgtcgcctactggaaggcagacaaggtgagcgcctatttcgggggttcgcccaccgtgggcacgctcggcgtatggagataccggggcgaaggcccgaaattcgtcaagctcggcggcaaacgcgagcaccgcaaacgcgatacccgccgcgtcgcctacccggtcagggaggtgatcgcctggggagaacagagcgggctccagcagcagacagtggccgcatagagatgtggtgccccatcaccgatgagggcatgtcatggcctccggccgacctgatcgaggagttctgggacaggatatgcgaccgcaacagccagacggccaacccgtacatctacctgctgccctacgcggagcaggtggacgtggaccgtcaaaacaggaaagtgagcgcgctggtggaatacgcgtccaaagccgattacagaggaggaaaaccgaattgagtgagaccaaggaaaaaccggagcgatccaatgcggcggatgtggcggagagcctgctgctggcgttggacgcggggccgaacaagccctcattgccagtgttggaggcgatgctcgccgaagcgctgaaggccaacgacgtgatattggtgcgcgccttcgcccagccgccggcaccgcccgcacaatccaagacgtccgatgtggaggccgagctggccgatgcgcgacgtgaactcgcgcatgaggcgtacggcgccgcttccatgctcgcggacggcgtgatggacgacgccgactgggagctgttcgatttggcggacgaggtgcgttccgccgccgttgccctgctgcgcgcgttggacggtgatgcgtgatggccggggagagcgctctcacgatcatcggcaacctgaccgccgacccggagctgcgcaccacgggcggcggcgcgaccgtggcgagcttcacgatcgcttcgaccccgcgcaactggaaccggcagaccaaccagttcgaggacgggcaggcattattcatgcgctgctccgcgtggggcgacatggccggccattgcgtccagtccctgaagaagggcatgcgagtgatcgcccagggccgactgagacagcactcgtaccaggcgcaggacggctcccagcgcacggtcatcgacatgaccgtcgacgagataggcccctcattgaggtatgcgaccgccgctgtcaaccgtgtccaatccggtcgcggctattccggtggctcgacctatggggatccggccaaacccgccaaccagcaacaaggctggcagaacggttccccggcccagaaccccggcatgccggaaggtgacccgtgggctcagccggcacccgcctctcctggcgccacgttcggcgcttccaacgatttttcatcagacagccaagaccccgaattctaaggagattcaatgtcacgaaagaaaaagaccgatggcgtgcaggacgcgctgattcccgacgagatcacgccgctcatgttgctcgccctgacggccaaggcgtcacgcatgaaggacgccgcggccgcgttccgcatcgcggccagcaagatgctcgacctggccaccaaggatgaatacatcgagaaatacaagaacatcgaccccatcaccgatgccttgtacgacgcctgcgatctctcgcagcacatcttcgacgccgccaacgcggtcaacgacctcattaactatccggtcgaggcccgcgagcgtgtggtgaaggcggatatcgagcgcagtttgttggatccgtggcgtgatctgcccacgtctggtgtggatccggataccggtgaaatcaaggaggactgaatcatgagcaaacgcaagcacggacgccagcaactggagcatgagcgccaacgccggcgcaggaagcgcatgccgcacctgcccgtacaccagaatctatcgatcaaggagcagtgacccgattcagtggctatcaacatcatcgatatcaacgtaaagagcctcatcccgaacccgaacaatccccgcagggacgtgggcgatgtcaccgaactcgccgacagcatcaaggagcagggcctgcagcaggcgcttgtggtaacccccgaccatgaggagcacggcgagcgcctgtttcgtgtggtgattggtcatcgtcgtttggcggcgtgcaagttggctggtttggagtctgtgccgtgtgtggtgcgtgagttggatgcgaagaccgagcgtgagctgatgctggtggagaactgccagcgttccgatttgacgccgttggaggaggctgacgggtatcagggtttgcttgacctgggtgccggtgtgggtgagcttgcggcgaagacgggccgttcggagtcgttcgtgcgtggccggttgcggatcgcgcgtatccccgccgatgtgcgttccgggtcggaggcgttcgctcagttgtcgctttcccagttgggtgatcttgcggagttcgaggcttatcccgacatgatggctgagttggcttcgatggcgggcaccaagaactgggattggaagcgtggccagctgcggtcgcgggttcgcgtcgaggcgtggcagcagagcatgagaacagcgcttgaagctctgggcctgactgtggatgtctcggcttcgacgtggacgacgccggagggctaccggttctacgacgtgtggagcggcgagcccgacgagttcgagaaatggtatgggcagtggcgcgagaagaacccgtacggcgggccggtgatccgattctccgagcgcaccgtattgtgcttcccgcaattgtcgcctgaggagatcgccgaacgtgacgccaagagcgagcggagggaacgggagcaggcggcattccaggaggcgctggccgcccgcaaggaattcgacaggctggcgtacacgctgcgcacggactggatcaggaagcacgccaccggattcaacggcggccagttgcgcaaggccaacacccgtctgagcctgctcgcgctgaccggcaccaacctatgcgacggcctgatcgcaggggccgaatggaacaacctcgaccacgtgctcgacgcatacaacctgctcgccgccacgccgctgccatgcgacgacacgagcgataggggactgtggcgcgaaacgaacctcgcggaactgcaccgccgccagcacgtcgagggagccgcgaacagggaactcctgctcatcctgtgcgcccagatcgaagcactcatcaaacccggcacatgggccgacgagtgcgacatcaccatcgcccaagcctactaccacacgctcgcagacctcggataccccaccagcgacgaggaaaacaaggcactcaacgggtgtttcctgcccgaagacgacgaggcgtagtgagccatgacatggacccagatagacgacgggctcaacttcagcccgcagaccatgcccggcacggtatcaaacgccgcgttgggcctatgggtcagactctgcgtgcacaccgcgtaccagctgcgatttcccgcattcgacggcgcattcgacctcacggtcgtgcgctcgctgaaaggcaacgcacggcaggtgacggaactggaggccgcgggaatgctcgaaccggcgctcgccgccggccggtggatggtggtcgaggccgacaccctgatgaaattcggcggcacttccggcagcgaactcaaggagaaaagagccaaggccgggcatgccggcggcgtcgcttcgggcgagtctcggcgaagcaaacgcgaagcaaatgcttcgaagcaaaacgaagcaagtgcttcaagcaaaccgcgaagcaagaccgaagcaaaccatgaagcaaaagacgaagcaaacggtgaagcaaaaccgaagcaaacgtctgaagcaaaacgaagcaattgcttcgaagcaaacgaagcaaccggtcctaacctaaccatacctagccttacctcccctgtagccccctccgcaccgaacgccgagccgagccaagccgtggccgaatccggccacgccaggccggtgccgagcctcgccgaagccgaggccttggccgaggccgacccgttcgcgttcgcctgggaccggtacccgagccataccggcagccgcgaccaagcccaaaacctgtggcaggccgtcaccagcggcagcgacccgaccatgccccaggccgagccgagccagctgctcggcgccgtcatccgctacgcccagaccgtgcgccaggacggcgaccggttcgtgccgtcgatgcgcaaatggctcgaaaaccggcaatacacgcaatggctccaaagcgtgccgaaacgcaccgaatggggcggcgtcacccgccaatggctccaaacccacgccatcagccaagtccccgaaggctcgtggacggacagcgtcgaacagacgttctgggcccacgtcaaaaccggcgaagagccggagaccgtggcgcaacggctcgtgacggaaatcaacgaaaggcatcaagcatgagcgaccaacccacagctgcgaccctgcgcctcgtggaaggccgtgaaaacaaccggtgcatcgtctgcgaccgatacctacgcggcggcgaatggcccggtagcagccaccaccaccggaaacgccgcagccagacatacggcgaccccgaacggcacagcccctcgaacgtcatcgacgtgtgcggcacggacaacagcaccggatgccacggatgggtccaccagcaccccgaacaggcccgagcattgggctacctgctcaaaagctacgaccccgagccaagccaagtgcccgtgtacagctgccggcgcggctggatactgctcgacaccgacggccaatggcactcatgcccgccgcccgagggaatgcccaaccacccgcaaaccaaccgataaatcagcagaaaggaacactcatgatcaacgcctacgcggtcaccgtgcccggcgaactcgacaacgtggacttcacccgagaggacggcaccagcgtgaccatgctcatcccgcccgacataccggtgagcaccaggacaatcatcatcccgcagggcttcacccgcgaggaaacccgaaccatccagggagccatcgttcaggcgctcgccggaaaggagaagacgctatgatccccgagaaacccgaagccctgctatggatggacgtggagaccaccggcctcgatgcgaacatgtgttcgatactggagatcgggttgcgctgcaccagcctggacgccatgcacgaatacgggcggttcgaggccgtggtgcacatcggccgggagaccctgctgaccgtgcagccctccgccctagaactgcatctgaacaacggtctgctcgcccaatgcgaatcctgcgacccgctggccaactcacccagggtcatcgccgagcaggccctgcggttcatccaaggcatggccaccacgtacgtcctgcacccggccggcacgaacatcagccgtttcgacctgcccatggtcgaacgcttctgcatgacgggcttcggagaactgctgcactaccgcatgctggacgtcaccgcactgcgcctcgcagccaaagcctgcggccaagacccataccagcaccgcatgaaacccacgcaccgcgtccacgactgcctcgacagggacatcgcggaataccgccactacctcaccctcatgacggggccggcgctcgcagaaaaggaggaccggccatgaagccacgttgcatcctgtgccgcaagcccgtgcccgacaaccacacccgatgcgtcaaacactggctcaacaaccaggaccaatggatggaggacgaccaaccggcacacgagcactgcaccccacgaaggagacccgcatgagccacacggcacgaatctggacacaagaccaactcaccgaagcattggcgagcgcctgcgtgctggaaggcgtgagcatcctgcacctcggccaatactccgatacggccatccggaacctcaaggcggtggccagaaccatgtacgagaccagcggcatgccgaccatcgtggaggacgacgatgagtgacctcacccaacaggccctcgcggcgctcgccgacgcggggctggacaacgagtcagccgccgaagcgttcgtcgtcggatatcaggcgggctatgacgcagcgctcactctggccatcagcatagaaacccatctcaactcgaatgagccgacagacgaagaaatcgagacctgtgcccgaggattcttcgagggaacacccggcatcaccaactgggacgcagtcagcgagcactcaaaacaagcatggctgcacgcggccaagaaagcgctcgccgccgtcaacacgatgaaaaccgaggaggaatcatgagcatcatcagcaaggaagcgtgcttccgctaccccaactgcacggtggacgacgtgcacgacacgttggcccaggtctacaccagtgacgacttgcaggaggcgtacatgaccggtgcggaacgggagcccaccggcttggaggtggaagccgccgccgaacagctctactactcggactgcaacagttccggcctgctcctcgacccagactggaacagactaccggacggcaacaaagccatctaccgcaaccgggtgcgcacaatcatcacaacaatccagaaaaaaggaacagcagaatgaacgagaacacgaacctcaccgacatcatcagcgcggcgctcgccgccggatgccagatcagcgtgaccatcactcccaaagacttctacaacgaatcacaggagccggaggaatgaacgtgagcgaaagcatcgactggcggcattccacgccgggagagcttgacctgcaccggttcatcggactcacgaggagaggccaaacactggacggctatctctcctgcttcacacagaacggccggtggacactcaccgacgccgacaatctcgccaccgtcatcaaaccggacgccaacggaaacccaacactcaacaccgaactcttccgctccatcaacgtactcaaggaaataagaccatgcaaaaaactacattagtccaccacagaactacattaaccaccaccggtttttacattagcgcgctcgccggaggcacccgaggatgcgcggaaactggtcggtggaatccaccatcggactcctgttcaccatcatcatcgcgatactggcgctcgccatcgtatccgccatcggcctggccgcgtacgccgcgatggacaccggtcccagccagcgtatcgtgcagcaggtggagaccacgggcgatgttcgccgcctgtgcatcgaggctcgaaccggcgagcgcgtcgatgccatgtcatgcgatttgattgatccgcatgcgggaggtgttgcgaagtgacgagttaggcgatacgcgacaaggtgctcgcatggcatgggcgcggctacggcgcgacggatacggcccgtcaattgggcctgccgttggaggaggtgcgcgcgatcatccgcgagggtgacggtcggccgaaaccgccatgcaaggtcgagttcattgaaccgccgctgttcgaggaatgaactgaaataccagataaaaaaacgaaaccctccacacgaggcggagggcatgtcagcaagcaaccagtttagccgatgtggagggatttcgtgaactgccagaactgcaacaccataatcgaaaacgggtacgcgctgtgcacggcgtgcgagctgcgcttcgccggcacgctcctgcgactggcgcgcgacgtcacgccgttgcacgactcgttggacgcgaccctgcatccgggcgggcattcgcccgtgcgaatccagacggccactcccccgactcctatcaggcttgacgtgctcgacctgatcgacatgctcgacgccacggcccgtgaactatggcgccgcctcgacggcatcgacgcactcgactggcgcaaagacaaacgcaacgaggatctgatggccacgctcatcgcatgcgccggacaccccaaactttccacgttcgccgacgcgggcttctacatgcacgtcgttgacggcatcgcccgcaaagtcgatactgcgctggacccgccggagcaacgccgcgagataggaacctgcgaactatgcgagaccatgctcaccgcaggccccagtgaccagtgggtcacctgccccgtgtgcgggagggaacagcgagcgcagaccgtcaaactgtgtaggctcaagacgttgtgttgggatgattccaggcgcgggtctgcggccgagatagccaaggcgttcacggacgcggggatcacgctcaaacgcaacaccgtcaacgtgtggcgcaaacgcggcaaactcgatgtcacaccggagggcatcgcctacagcagcgtctacaggcttgccatcagcggcgaacccgtggacgagctgccggacgaaaaggccaaaccgtccgacgaacttgacaaatgactgactgtcaccgatgattgcaatggcagaagtgtcgaaaaacccagctcacgtggctgggttttcgcgtatctgcccacattgcatgggctgagagtactccgccggcagcgtccaaagctccggtgctagtcagcccgccacagcttgcgtacggtagaggcctaaccggtcatgctgggatagcacgacagggagtaaacaccgacactctctcgcgaattcgaatcccgtccaagccaccaaacacatcacagtccgacaaggagcgtcgtatggcacagcccatcaacatcgatatcgacgagcaatggattcgcgaccggttcgcgaacatgctcatcgacatggcagaggaactcagccccgggatacgcttaggacgtgccggccgccgcgcgggatatgtggatggtgggtgtcgcctagtctcggtatgtcgggattcgatcacccggccggccaattcggaaacagggtctcaaaggtcttgtccggattgatatatcgccgcactatatcggataccatatgcttcacttcggtttcgtcggcaatgccataaaaacaatggcacatttcctcgatcaccgaaagaatcggcgcgctgtcagaaccgggatatagttgtcgccacaaccccacacggaaaacaagaaccgacttcgtgacgcccaaggcgttctcgtcgtacgtcagagaaagccctgaacccgggataaacaccaaaagagccgaattccgtatcagaggcggccgtctgtcgaactcctttgccattgcatcaagtgcgatgttgatggcgtcgcattcatgcggcagaagttcgatcgtggatcgcatgtcgatcctctcggcaagacgcccgggtattcttatcccgtacatatcgatagctccgcggacaagcatgttactcctcgctttcgtcctcgtgatgtttgcgtggcctgcctcccccgacgccgcggccgggccggttggcgttccattcatcgatggtttcgggaagccagccgcgcgtgcggccaatcattgcgtcgggctccgggagtttgaggttgagcaggccgccgctggtgatgccgaggcgttcggcgacctgcttgacgccgaggtattcagtcgtcattcccggcctcccatcaccgccgtggcgatgcaccacagtcccgcggcaagcccgaacaggccggccgggaccgccttgcccgcgaacccgagcgacagcgacaccagcgcgcatacgacgccggcgatcgcgaacattcttgttgtcttcatgatgctccatgaaataggatggaccggagggttccggatacttgggatattcggaaccctcttgcgtcaccgcttatgctgtggcggcctgcgcagcgaggtgactatcgccacgagcgacagcacgttgctgaccactgcgctgatcgcggttacgacgtccgtccatttcatgttcacctcctttccttggctgacatatctatagtaacacaactactatagatatgcaagtggagaacaccacgacacgccaacaaccccaacgaacacgaggcaacaacaatggccagcaacggatacaacccacgccagcgcaacgggcacaggcgcaggcagaacagggcgcgggtcaaagccgccaacacatgctgctacatttgcggcagaccaatcgactacacactgaagtcacctgacccgtggagctacgtgctcgacgaaacaatcccaatcgcacgaggcggcacgctcacctacaacaacagcggagccgcacatcgatggtgcaaccaggtcaaaggcacgcacacattggaatgggcgcgcagggaagtcgccaatattctcaacggcaaaggtaaaggcatgcaagcgcgaccaacttcaatcccattcacccggctcgacgtgtgaccccagggcggtacaccccaccccaccggcagtggctccccccggcgcatagagccgatatctccccacggtttcggtaacggtaacgcgttacggcatcggcaacgatttttaggaggcgtcatggcgaggatttgcacggtgtgcggctccccgctgtccaaggacgcgcgagagggtgccgaatactgttcttcgaaatgcaagcagaaggcgtaccggcagaggaaggccggcaacaggcctattgaaccaaaaccgaaggtgaaatcgaagcccgcgcctttgccgacgaaccgtgagctcgagcggatgatggacgagccgatggaagatgtgctgcgccacacgcgcgacgtgctgaagaaggcgttggacgatcccgacacccgcacatccgatctgccggcgttatcccgacagtacatcacggtatgccgtgagcttgaagcccagtccggcggcaatgacctgttcggcgacgagtccgtggaatcaagcgaggtggatgatgtcggagcgtcgattgtctgagctcgcccgagtgctttcccagccgtcaggcatcgtctccagcgatttcccgaaattgcggcgtgcggccacgcgcatgggcatctcctacgacctgtggcagcagggactgctgtatctcatgctcggcaagcgtgagaacggcctgtatgcgtgcggcgagggcggcactgtcatatcgatatgccgtcaggtgggcaagacgttcaccatcggctccgccgtgttcctcctgtgcgccatgcaacccaacctcaaggtgctgtggaccgcgcaccgcaccagaacctccgatgagacgttccagtcgatgtgcggcttcgcgaagaacaagctcatggcacgccatgtggagcatatccggcgcgcgaacggccagcaggagatagcgttccgcaatggttcgcgcgtcatgttcggcgctcgcgagcagggtttcggccgtggcttcgacgcggtggacgtggagatcttcgacgaggcgcagatcctcaccgtcaaggcgttgaacgacatgatcccggccacgaacgtgagcccgaatccgctgatcgtgttcatgggcacaccaccgcagcccggcgacccgtccgagacgttcgccgacaaaaggcgtgccgggctcaagcatgtggacggcatgctctacgtggaattcagcgccgaccccgactgcgaccccgacgaccgcgaacagtgggcgaaggccaacccgagtttcccgaagcgcacttctgagaccgccatcctgcgcatgcgcaagctgctcggcgacgatgacaacttccgccgcgagggcttgggcatctgggacggggagaacagcatgtcggccatagacccgcagcagtgggaggccggcaatatcgatcagtcggacttggacggccggcttgcgttcggtttggatatgccgcccgaccgcagcgccctggccatcggcatggccgtacgccatgatgacggtacggcgctcatcaatctgcaggaataccgtgacgcgaaacagtcgggcaccgcgtgggcggtggactggcttgcggaacgctggccgaagaccagcgcggtggtcatcgacgcgcagtcgccggccatgagccttttgcccgacctgcagaaacgacacatcaaagtgattgtcacccagtcacgtgatctgggggcggcgaccggaagggtgcttgacatgatccacgccggaaccctgcagcatttggacgcggagcaccagccgcaactgagcatggccgcgcacggcgtcacgttgcgtgacatcggccccaacgggctgaaggcgtggaacaagaaaggctccgacatcgacatcagcccgttgcaggcgtgcacggtcgcattgcacggggcgttcgtcagcaaacgcaaaccgggcaggaagcagagggtgatggtctgatggtcagcagtgaaatcgtgaccgccgcaggcggcaaaccgttcctcgccagcgaatcccttccctccattcgagctataaaaggcatcgatgaggctgattgggacatcatcgagcgtctattgcgggtgtggctgcagaagcagaacggcaatattctccgctcgctttactattcggcgcacgaacgggtcaaggatttcggcatcagcattcccgacaagatcaggtcgaacgtgtccgtgatgatcggctggccggccaaggccgtgcgcatgctcgccgacctgagcgcgttcgagggcttcagtatcgacggaggctctgatgagggcttggccgccgacgtgtccggcgtgttcgagtcgaacgccctggataccgtcgtctcgcaggcggtggtgagcgcctacacgcattcatgcgcgttcctcaccatcagccgcaccattggcggggtgaccatcattccccgttcggcggattggtcggcggccatatgggattcggtcaacaaccggatcggatacgcgctgaccatcaccgacgccgacgagcatggcgtcatcaccggtttcaacgtgtggctgccgaaccgcgtctacgtgtgctcgaacagtatgggcaagtggtccgcggaacgccaggatacgaattacggcaggcccacggtggtctccctgtgctacgacccgcaattgaaccgaccgttcggccgttcgcgcatcacgcgcccgttgatgtccctgaccgatatcggcgtgcgcaccatgcttcgaatggaggcgaacgccgaattctatgcggccccgaaactctggttcctcggagccgaccgcgacgccttcagtgaaaacacgtggaagagcctgataagcgccatcaacgcgatcagcaaggacgaggacggcgacgtgcccaccctgcagcaggtgcaacaggcctcgatgcaaccgcattcggacatgctcaagaccatcgccatgctggtggcctccgagacgaacgtgcccgtcaacgatctgggcatcacgatggacaatcccgcatccgccgaggccatggccgccgcggaacgcaagctcagccgcgaggctgaccgtcagaaccggctgttctcccgcgccctgaaggacgcggtgggcatggcgctggacttggattccaccgagctcgcgcgcatcaccccggtatgggcaccgacccgcgaggtgtcggacgcggcccgcgccgactcgttctcgaagatagccggcgtgcagccggcgttcgccgaatccgaggtcggctggcggtacgccggattcccccaaagcgatgtgacacagatcatgaatgccgtcaatgcgaacaaggccggcagcgtgctcgaccgattggtgaacggaggcgtcgatgacagacagcagcagccgaacgcccagccgcaaccaagtggacaaactcagccaagcgaaccagtcggtggtggcccgggctcagagcgagcttgacaaggtgttcgagaccgtcatcaacatgtatgacgatcccgccgaccagcgcgacgccctgctggagctcgtgcccgccatagcccgcaaatacggcaacatcgacagcgtggccgccgccgaatggtatgagaaggtgcgccacaagtggatcatagacgacgactacacggtagacagccgctacgacccggatgatgtgccgatgaggaagacggtgcgtcgtctcgccggccacctttgggacgacgaaaaaaacggccgcggccccgattacgacgccgcgaaacgcgggctgcacgccagcatggaccggtgggtaaaggccggtggtcgcgagaccatcatgcgcgcctccaaacacgacccgtcgaagccccggtacgcacgagtaccgtccggtgcgaagacgtgcgcgttctgcgccatgctcgcctcccgtggctttgtttacgctagcgaggacaaggccggggcgctcggccaatatcataaggactgtgattgcgagatcattccgagctgggacaggaagaaccccaaaatcgagggctacgacccggacgggctgtacagggagtatctcgaggcccgtgattccatggaatccgaacagcccacgctcaaggaaatcctcacggccatgaaatcccagcccggccggtacaacgactcgtttgcgccgtacaaaatcagtgtcgccaaggagtcggattttgccgcgaccataggttcgcggcatgtttcggcgttgaacaagctgcttaacgattccaagcatcacgacacggccgagctcttctccagaggcacgaacgagtacaggatactcgacacgaaactgcccaatgacaccgaagcccatttcagcccctcggatggcggcatatatctgaatctcgccgccgtaggaaaacaccagccgggccacccgccatacaacacccttgtccatgaatgctcccacatgctggattggatacttggcgacgataaggcccagatgtatttctccgcgctgtcacgcgaagggcagtccttcgccctcatgctcagcaccgatgcgcgccaagccttcaacgagcgtctggcgaaagtccagggaggcagcctcaaggccagacgagaggccgcacttgggcaactctatatggacgtcgccgcggacctcggaaagaaaggggaccactccatccacgacatgttccaggccggccttggaagccaaggagacgactacgcctatctgctttcccgtttcgggcacagaaaagggtatttccaatccagcgggaaccaggaggccgaagcgttcgccgagatgatggcggcgcagataaccgatgagcattcatgggagataatggagaagtatttccccaacgccacgaaaatgttcaacgggatggtcaaggaggcgctgaatggcaaagccctggagtgacgaagtcgatgcgctgctcgacgagtacgcccgcagattccacgatatctatttccacttcggcgaaacatatccggacgatgacgaaaagctgaaagccgatatccagcattggctcgatatcggcaaaccgcgcccatggacggatttccccggagacgttctcatttaagcgagagcgacatttttttgtaaccacccgcacgggtggtttttttatgcccgaaaagggcccgtcaacccataaggagaacaatcatggccgaaaaccaacagtccggacaggagccgaacggcgaatcgcaggacatcgactacaaggccaaatacgaggaggccatcgcccattcacgcgagtgggagaagcgtgccaaggccaacaagaccgccgccgacgagctggaacagctcaagcagtcgcagatgagcgacgcggagaaggccgccgccaagaccgcgaagctccagaaggagctcgaagagctcaaggcggagaagcagtcgaacgcatggcgttcgcaggtcgcctccgaaaccggactgcccgcgaacctcatcaccggctccacgttggaggagatgcaggccaacgcgaagtccatcagcgaatacgtggccgctcagaccggcaggaagctccccgaggtcaagaaccccggcaagcagccggacgtggcgccgaacgacctgctgcagttcgcctccaacgtgttctccaactagcaaccaaccatttcacagtaaggagccaatatcatggctattttcggtacaggcggcatcgccgccatgcccaaccagatcgcggacggcatcgtcgaccaggtgcagtccggcagcgccgtaggcgtgctttcccagcagaaggcgatgcgcttcggcgagaccagcatcgtcacgttcgagaaccgtccgaaggcggagttcgtggacgagggcgtgcagaagtccagcaccaccggctcgttcggagtggtcaagaccgcaccccacaagacgcaggtcaccatgcgcttcaaccaggaggttcagtgggccgactccgactaccagctcggcgtcatcaacaagctcgcctccgagggtgccaaggcgctttcccgcgcgctcgacctcggcctgttctactgcctcaacccgctgaccggcaagcctatcaaggcctggacgaactacctgaacaagacgaccaagcgcgtggcccgcaccgccagtccggacaccgacatcgagaccgccatcggcctgatcctcaacgacaaggaaggctgggacgtcaacggcatcgccatgagccgctcctacgcctttgacctcgccaccctgaaggacacgcagaagcgcccgctctacccggagctgggctacggcgtgaacatgaactcgttcaagggcattcccgcatcggtgaccaccaccgtcaatgccccggagttcgtcgcgcccgcgggcggagatgcctacacggtgccgaaggtcggcgcgatcgtcggcgactggaagaacggcatctattggggcgtgcagcgcaatctgccgttggagaccatcacctacggcgatccggacgggcagggcgacctgcgccgcaacaaccagatcgcgctccgactggagatcgtctacgcctggtacgtgttcaccgaccgcttcgctgtggtcgagggcgacgcacccaccagcaaggcggtcaagtgatgagccaggcagtcgaattccaccacctgacctcaggggtggcgaacaccgcccgccaggcggtcatcgaaacccagttcgtcgacgataagggcaaacccatcgacctcaatggcggttcttccaccccatctgctggcagcgtcacgccggccagtctcggcggctattccgccgccgccggccgcggcaaggtcgtgcaggtcaaggccgatggcagcggcttcgacttcgtcgccccggtcacggccccgaccgccgacacgcttaccggtgctacggatacgggcaagcgtgtgctcaaggcgactgacgctgcggcggcgcgcaaggccatcggtgccggcaccagctcgttcagcggctcgtacgacgatttgacgaacaagccggcgattcctgccgcctacacgctgcccgccgcgaccgctgcggcgttgggtggcgtcaagcagggtgcggccgtaccgaacctcgccgccgacgcgaatacgacgaccgcgaatgccaagatcaacgcgctgctcgcccaactgcgtgcggccggtgtgatcgcggcctgagggaggtgcgctcatggccgatgacgctgatccgggcatgaacgtgcccgctcccccgttcgccagcgccgatgatctcgcctcccgttggcatgagctcaccgacgccgaacgggccaaggcggagacgatgctggccgacgcgagcgacaagatcatcaccgactgccccaattgggctcaggcctcggagaccacgctgcggcgtatctgctgcgcgatggtcaaaagggccatgctcaacgaggacgtcgccggggtcacccaatccacgcagaccgcgaacggtttcaccgaggccaacagctacagcaaccctgacggggatctgtatctgacgaaatcggagaaacgctcgctgggctgcggcgtgcaacgcatgtggagcatcgacctgtccgacggagcgtgaacccatgagactgcatggcgaaaccatcaccgtcacatggcgcgtgccgaccggcgaggtggatgggggcaacaagcccgtctgcaggacggaaacggagaccatcgacgacgtgctggtcaagcccggagccgacgagaacgccgccgactccacacggccggccggtatcaccgccgcgttgacgatcgcaataccgagggtctggacgtaccggagcctcaggaatgcgctggtcaccatacgcggccacgactatcgggtgataggcgacccattgccggtcgacggcgggattacccccacccggtggaatttgagcgtcgaactgacggatacggagggatgacgcatgtcaagcaacgtgaaactgaacctgccggcgttcaccgcgttccgccagtcgccgcacgtgatcggtgccgtcaatgcggaggccgaacgggtcgcggcgagggcgaacgcgctcggccacaactcgcatggtggcaaaccccagtacggggtgctgccggcgattccgtcgaacgtgggcaccatcgccctcgtgcaggccgagaaccatcaggcgtacgtagacaacgcggcccacaacacgttggccaaggctttgggaggtggcggctgatggcggtcaacgcggaaaaactcgtcatggactggatcaacgccgacccgacgatcaaggccgaatatccggccagtttcgacgtgcccgccgaatcatcggccacgcacccgatgccgttcgtcacggtcgagcaggttggcggctcggacgaacggttccgttcgctgccgcttattgcggtgcaggtgtggggcgagtcgcgctggctggcctccgaggccgcctccaagctcatcctcccccggttgaaacgtatcacggaactgcccgaggtcgccgacatcgacgtcacgggcaggacgcatttccctatgccggacgggcggccccgttatcagatactcatacaactcaccgtcaaatcggacgactaacgaaaggtctaaatcatggctgattccacaaccaacgattccaccatggtgtcgttgggcaagttcaaggtcggcggctacgcctactgggcacccgccggcaccgcattgccgaccaatgccagcaccgcattgtcgagcgccttcaaactgctcggctacctgtcggaggatggtctgaccatcaagaccgacacgggcaccaccgaagtcaaggacgcgaacggcacgacagtgatgaaggtcatcaccagctacgcggaatcctaccagttcgccatgctggaggtattgcgcgtcgaggccgcgaaactgcgctacaacacggacgcggtcaatggcagcgacagggaaatgaccatcaagcatcagatgccctccggcgagggcttcgtgctcgtgttcgagatcgcgatgaccggcaatgtgaaggaccgcctcgtgatcggcaacggcacgcgcgccgagttcggcgaccgacaggtgcatgcgggcgacgctcaggtgtacgacgtcaccgtgtccgccaacgacatgggcaacggcgtcaccgccatcgaatacatcggcagggccacggctgtcagcgagagcgccgccgtcaccgaggccctgctcggcaaggtcgtcgacccggccaacggcgacgagaacgccgaaaccgccgaagaggttccggccgccgaatgacggttcttcccgcgtcgcgcttcgaacgacttcccacgacgcgggaaccttttcttcgttcaaccgtggaagtcgttttcactagtcttttggagaagtcatcatgtcacgaaaccgccaccgttccggcaaccccgccaacaatgttcccggcagccgtccgcaggatcacaagcccgcgcagggcaagccacgcaccgtcaccgtcaaagggctcgtcctgacactggacccggccaagctcaacgactgggagctcatggaatccctctacgacctccagtccgacccacagaacaatgcgctgagcgtggtaccgttcctgcgcggcatgttctcagccaaggactacgggcgcatcaagaaccgtctgcgcgaccccgaaaccggacgcatcaccggagacgccatgggcgagttcctgcaggaactgttcgcgcgtctgaacgaggaatccccaaactcctgacgctcgtatacctgctgcatgcctgccccgaccagttggcggcggacatgcggcgcgtatacgggcttagcgtctatgagctggatccattggaagcggcagcgctggcggtgaacctgcctgcgggctcactggtgtggcagaggctggacgttccggccgcctggacgctcgaccagtatctgatggccgcgcggatcgaccagatgaacatgtggatgtggggcaacgccgacccgaagaaacgcggcccacaacccgaaccgctgccacgacccggcaacggaagcggccatgccgtcgcgaacccctccaatccggaggactccggggaagcaacgcgcaggacgcgcaccatcaagcccatggccctgaccgtcgccgaactcgacgagttcatgagccgcgacttcacggacgtggagacgaaacccttcacccacaacgaataaccgaatagagaggcacggtcatggcataccagctggctcaggcgtacgtgcagatcgtgcccagcatgaagggcgtgggcaaggccatcgaaagcgcgttcgacgggccatccaaatcggtcggccagaaagccggcgacaccgccggcggcggcttctccaggggattctccgcgaagctcggcgtgatcagcggcgtcgcatccagcatcgccacgaaggtcatcggcgtgttctccggcctgtccgggcagatcctcgacgcatcggattcgacccagaagttcgcacagacactggacttcgccggcgtcggggccgaccagatcaagaaactgaccacgtccacgcaggagtacgcgaacaagaccgtctacggcatcgacgacatccgcaacaccaccgcccagctggccgccaacggcgtgccgaactacgacaagctcgccgaagcggccggcaacctgaacgcggtcgcgggcggcaacagcgaaacgttcaaaagcgtcgcgatgatgctcacccagaccgccggcgcaggcaagctgaccacggagaactggaaccagctggccgacgcgatcccaggcgcttcgggcaagctccaggaggcgatgctcaagaacggcgcgtacacgggcaacttccgcgacgcgatggccaatggagagatcacctcacaggagttcaacgacgcgctcatgcaactgggcatgaacgacggtgccatcaaggcggcggaaagcacgcagacgttcgagggcgcgttcggcaatctcgaggccaccatcgtggacggtgcggcgaacatcgtcaacaccgtcaaaccgtacatcaccggagcggtcactgcgttgggcgacggcatcggcaaggcgatgcagtgggtgaacgacttcacgggcgcgctcatgaaaaccgagggcgtgcagacgttcgccaacggggtgaaaagcatcgccggcgcggtcggttcggtcgtcggcccgttcgccggcgtcatcggcagcctgctcggcttcaccggcggcgcgtacagtgccggcggggccgcccagcagttctccaatattctgggcagcatcggcggcatgctccagtcggtcggcacgttcgtccagcagaacgccgactggatgcaggcgctcgcggtcgcggtcatggcgggatatggcgcgttcaagctgttctcgatcatcacgaccgtggtcggcttcatcaaggcgttcagcctcgctgacaccgtcgccgccgcaaagcagtggctgttgaacgcggctatgaacgcgaacccaatcatgctggtcgtcaccgcgatatcggcgctggtcgccgcactggtctggttcttcacgcagactgagacgggtcgcaaggcgtgggcggcgttcacgtcgttcgtctcctctgcatggcagaagacggtcgatgccgtcaccagtctcggccagaacatcgctaacttcttcacgcagacgcttcccaatgcgttccagtccgtcgtccaatggtttcagcggctgccggaacgtatcggcagcgcattgtcgaacctgctcacggctgtgggcgaatgggccacctgtctcgcgcaatccgcgtggaccgccgggaaccagttcgtgcagaacgtcgtgtacttcatcacgcacttgcctgagacgattgcctactggctgtcctattcgatcacgttcgtggtcgcatgggtcgcgcttatgggtcagaaggccatcgacgctggcacacagttcgtgcagaacgcgggcacgtttatatcccagctgccaggcaatatctggaactggctggtcgccaccgtcacgaacacggccaattgggtggcgcagatggccggcaaggccagcgaggccggaagccagttcctcaacaacatggccacgttcatttcccaattgcccggcaggatatgggcgttcctcgtgaacgtgctgaccggcgcggccaactggacaggacagatggcgtcgaacgcggcgcaggccggcagcagtttcatacggaatgtgatccagttcgtatctcagctgcccggatgcatcgccgcctacctgcgcggcgtgatatcgaacgtcggggccttcgccggtcagatggggcagggcgcgctcaacgccggacgacagtttttgagcaacatcgtcaacacgctcgcctcgataccgggccgtgtggtgtccatcggacgcaacatcgtcgagggcatcgtcagcggcatcatgggcagcatgggccgggtcggctcggcgattctcggcggcatgaatgccgccatcgccaacgtgaagcgcatgctcggcatccactccccctcacgcctgttccgcgaccagatcggcatgatgatgggccttggcctcgccaacggcatcgacgcttccgcacgctatgtgaacgcctccatgggcagcatgatcggcgggctcatgcccgacatcaacgacctgctgcccgccaaccgcacgtacgacgcggccacgatgaaccggcgcatagtgtacacgccgtccacggacgccatgcaaccgcaagcgggcgcgtcgaacgtgaacatcaccaactactatccgcaggccgacccgtggccactcgccacgaacgacagtctcgacaagctgacggtcggaatctaaagggggttgcttatggccggtgtcgattacgcgctcaacggcgtggccctcgactcccagtattgccgggtcacgttgggcagcaccctgttcgctggggtctccgtgtcccgcagcaaggtcagcgccccgttccggcatggcacgataccatccggtttcgccccatcgttcgaggaacgcagcgtgacgctcaaggtcaccgcgttccgtgcgggagcattgggccgcgctgatgccgcgggtttggattcgagccgcctggcgcgcctgtgcacggcaccaagcctgacattgggccgtcgggtcaacgggcggagacagcaggccgtcgtggagctcgccagtctggaggccgacgacggaggcaccgtgctggacaggctcaccccgttcacggcggtgttcgccatgccccaagtgtggtggcgcgatccggtcgcgtatgaccgtcaggtggcggcgaacacaacggactggctgtggccgtcagccgtgcaatggcggcaggaatactggacgcgctggagtggcgcggcgaacgattcgaccagtctcatggcggatttcgtgaccatgtggattggtgagccgaacaattcgccgtcgctgctgatcccgttgtcgtcgggcataccggatggcatgttcggtgacgcgcccgtcaccgatccgataatacggctgcccaagggcgtgagcagcgcctcggtcaccgaccccacgtcgaacacgggcgtcatctggcagggtgcggccaacgcgaacgcctacacgtatgtggacgtgggcaactgcctcgcatggcagtccacggcggatcatcagtggacgcaatctggcacggacgtgaccggcggcttggattatccggcgggcggcctgctgcaatgctggccgaacccggtggacaacggctaccggctcacgtcgaagatcaccggcagcggcgagccattgctcgtgcacgtgcgccgcgcatggtggtagaccccgtattccccttctatgcaatttccgcgccggttttcaacgtctggagtccccttatggtcaagacactgcacgcccgcctcgtcgcctacctgcccaacggcggcaggctcggcaacctgcccgcaccgctctcatgggacgcgagcatcgtcaacaacgacctcggagcactcaaggtcgtctacagccgtcgtaccgtcggcggcggaatcctgaaacgcggcctcgaacaggggctcgagatcgggctcgaggtcagtgacggcggaacatggagcgaaccctacaactgccgctacctgctcataggccgctcccgcaacgccgaagacgtgtcggacacggtgacgctcacctgccagagcatgggctggctggccaacaagattctgaacaacgacaccgcgcatctgatagcggacggcgacaacaagggcaagcgcgcgttcctgtcgaagaaccccggcaccatcatcagaacgattctcgatgagaacaaggcccgcaagggtgccggcctcgttttgtcccccggtttcgacaccggcaaggacgcggctggcgcgaactggaagagcgtgtacacgctctactactcgttgggcacgagcctgaacagcatgctttcgagcatggtgggcggcggtgccatcgactggcgcaccgagggccgcaccctcagaatctggaacgccgacagcaccagtctcagccgtgacctgtcgggccgcgtgcacatcagcatggcgcacgacatactcgaggcacccgaagaggaaagcatcgaagacctctccagcgatatcctcgtggagggtgacaacgggctaatcttccgcgagtcgaatccggcggcacccacgccgtggggtggctgggaatcctatgtctctcagggtggagtctcggacgaggccaccgccaaggcgttcatgcagaccacattggccagcgcggcccgtgtgcgcggccagtacacccgctcgctgctcgtcaccaacgccgaatcattgccgttggtggactaccggcccggcgactggatcaccgcgcccacagtccagcacggcgagaaggtgcgaatccaacaggtcaccgtttcgcttgactccaacgggctcaaggccagcatcacgctcaacgacaaggtgtacgactcgcaggtgcgagccaacaagaagattcagggcatcaccggtggcgcaacgttggccggcagcgagggcggccgcccggctccggagaaggatcatcgcacgccgaaggccgtgaccggtctggtcgtggcgaccgacgcgtatatctcctcccgtggtacggctttgggtctggcgaccttgcagtgggctgcggtttcgcaggccacggatgacacggccatcgacatttcgggctatcgcgtggagtatcgcaagaaccttgcgggtgcgccgtgggtttccggtggggtgacggacgcgcagcggctcacgttgggcatcggcggtctggaatgcgggcaacgctatgagttccgcgtgcgcgcggttcccacgtattccgaccggttgggtgactggtcgaacgtggtcatggctttggtggcgtcggacgtgacgccgccgagcatcccgtccaagccgatactcacctcgaaattgggtgtggtggacgtgcagtgggacggcaggaacaatgccggcggcggcatggagctggacttcgaccacgtggaggtcggcatcagcgactccaacgggaactggaaataccgggatagcgtggcgcgtgacgggcattgcgtcgtcaccggattggagtatcgcgcctactggttcgctttgcgttcggtcgatcattcgggcaacaagtcggattggggtgtgggcgcgtcgatcacggtcgccagcgcggtctcccaggacgatctggacaggctcgacaaggacctcgccgccaacaaggaggctttgcgggacaataccgacaagctgtcgcaggcgcggaaggatatcgccgcgaatcaggccgcgcaggccgccacggcgaaggaactggagtccgcgaagtcggacatcaaggcgaaccagtcggccatcggcacggcgaacgccacgttgcgggataatgctgcgaagctgacgcaggcgcagaaggacatccaagccaacaagaccggccttgacacggcatccaagtcgctcacgcaggcgcaatccgacctgtctcaggcgcggaaggatatcgcgcagacgaaatccgacctgaccacggcgaatggcgagatttcgaaggcgaaggagtcggcggcgcaggcgtatgccgaagcccatagcaagaaccatactttccgtgggcctgacatgccggacgcctccaaagggctgatcgtcggcgacctgtggctcaagacccagcggtattggactcgctggcaaggcgggaagaataattcgccgtccatgctcgcggacttttacacatactggcagggcgctccgaacgcttcgcctagcgttttggtgccgcttgctgaccgcgtgatcgacacgctcgtttgggacggagccacgtggaaccatctcggttatgccgatgtcgaaaagaacgcggacgaaatttccaaggctaagtcggatatcgcggacaacgcggcgaagaccaccgacgccaagagggctgctgagaacgccgctgccgcagcgaaaaacgcgcagggcacggccgatacggcaaatggtgcggcgaagacagcgcaggataccgccaacgcggctaccgctgccgcgaagagtgccaccgccaccgccggtcaggccaaggatgccgccaatgccgcgcagaccgccgccgaaagcgcgaagaagaccgccggcaatgcggagacactggcgaacacggccaacgcttcggccaatgcggcgaagtccgacgcggcttcggccaaatcggacgcttccaccgcgaagaccgatgcggccaacgccaagaccaccgcctcgaacgcttcgagcgtggccacgcaggccaaggccaccgccgacagcgcggcccagtccgccacggacgcggccaccgccgcaaggaaggcgaatacggctgctgccgccgcggctggcgtggcgaacggcaaggccgacgtgctcatccagtccactgctccggatacgtcgatgcgcaagccgactaccttgtggatcgacacgacgaatggtgcgaacacgccgaaacggtggaacggcagcacatggatggccgtgacggacaaggcggctaccgatgcggccaatgcggctgtcaaggcccatgccgccgcgcagacggcgcaatcaacggctgacaaggctcagaccacggccgcgaatgccgcgtcacaggcgaatcaggcgcaggccgcagcgaaaaaggcgcagactacggctgatggcaagaatctgatctaccgtggcccggacgaacccgcgcatgatgggttgaagccgggcgacatgtggtggcgcacgcagaagtattggactcgctggaagggcactcccaataacagcccttccatgcttgctgacttctacacctactggacggggactccgaataacagtccgagcgtgctcgtgcctctgtctgatcgcgtggtggaggtgctgacgtgggatggtacgcgcttcgagccttttgacctcgtggcgaacaacattctcgcgtcgggtacggtggctgcgaagcatctcgccgtggattccgtgactgccgaaaaggtcaaggccaatgccatcacggcggacaagatcgccgccaacagcgtgacgacggagaagcttgtggccgacgcggtgaccgccgcgaaactcgcagccgacagcgtgcaggcgcgcaacatcgtctcgctcgccatcaccgctgacaagctcgcggccaattcggtgaccacgagcaagctcaaggtcaccgaggatatgaccgtggcgctcctgaatgtccataagattcatgctggtgacatcgtggctggcgctgtcacgaccgacaaactcgccgcgaacgcggttaacgccgacaagctggccgcgaacgcggtgacggcgggtaaggtgcaggccggtgccatcggcacggacaagctggcggcgaactctgtgacgaccgcgaagctccgcgtgacggaggacatgaccgtggcgctcctgaatgtccataagattcaggcgggcgacatcgtggccggcgcggtcacgaccgacaagctggccgcgaacagcgttaacgccgacaagctcgccgccaacgcggtcaacgccgacaagatagtgtccggcgcgatcaccacggacaagctcgccgccaacgcggtgactgctgtcaagatcgcggctggcacgatcacgtcggataaggtagccgcaggccagttccggggctacgtcttcaccggcgcgatattccagtccagcgaggcggcgaacactggcgtgaagctcaactcgaccggcctgcaaatgtgggattcgaaccacgtccagaccgtctttctggacggcgagggcgggtcgaacctgctgaccggcacgttccagacgagcctcaccggacatcgaatcataatctcaccgacgttccgacagtcgtttatcaacagcgatgacaagaccgaaggctcaggcatcgaattcaagcacgggcgcgacggtcacgacgtctacatcgcgtcggaatccagaacccaatccaaaggcgaagtctccaccatcgtaatcaacggaggccggttgaccgacaccgatccggggtcgttcatgcgtttgggtgaattcaaggctgcggacaacgccaccaaaatcggcgacgtcttcctagccgcttaccgtgattattccaaagacagcggttcctcgcaactgtccttgaacgccgacccgacgggcaaataccatacatccgccgaactctcagcgcgagatacgaacggcagcgtcggcgtggatgcggacatcaactccgggtatctgtacctcggcggatttctcggccgatacgccggtgggagaggcacgattcacacggcctattttcgtggcgggataatgagcggcgaagggtggttgacgcagacgtacacgtatgcctccccggccaaatacggcttataccatgcgcatgtctcctccgactccatggggtcgatcatagtcggctcgaacaacgattcgccgagcggctgcggactgtgggcgcgtggcatcggcaacggcgtcaatatcccatacggcactcagctgctcgccatcctggccaaacagtaggaggcgtgatggaaacgaacatctacggtgacatgttggccgtgaccggtgacgacgggacgcgtcatctcatcccgttggacgcgatcgcctcgtgggacgagctcctcggctgcgacacggacatggaaacggtcgcggcaatcatacgggtccggtcgaacaggtcagacccgggcgtcatcgacccggccaccggacgcaccgcttggaccagcgcctacgagcaggtggagcgcgacgagttggcggaccgtcagcagacgcgcatggccgcgttgcatcccgtgctcacggcgtccggcgcgttgtcgccggacggtcgcgaggagacccgtcgcctgctcggattggacgcgatgcccgtcatggaggatgcggacggtcggctcgccgccacgctggccggtgtggccgaccgcatcgccgtggcgcgcgaccggttccgccgacagtcgatcgattatctgaccgaccatcggcgttgacgcgggccggggacggccacgcgcatcgactccgccgggacggcgtgggattccacacgccatcccggcgaaaaaggcaaacaacacaacagcaaaggagtaatcatgacagcatctgacgtccagcaagcccgatcggacgacaccgggtccggtggacaggccacgcaatccggcgcacgaccggcggcggatggcgtgctcgacctgcgcccgccgaaggaaagcctgcgcgcggaactgtgccgactcggattcgagtattcgtccgccgaccagacgggcgaatcatggcgcgactaccagcgcggcgtgctcgccacgttcgatggtgacgccgtgaacgtgacggtcacggacgtgaaaacgaatctcagccgcacgctcactgtggacgaattgaagacggtgacccgcatcgacacgatgaccgccgccgactaacccctgcttttcacccgttttttcaacccctgcaatccgattggattgtgggggtcccgcatttcgaaggagacttattttgactcagattccagccgacgcgaacaccgtcatcgaccagctctcgcaacagatcggcacactcaacaaacagatcgcgatcctgtccagccagctcgcggcggccatgaaactcatcccgaaggacgtgctcgacagtctcgacaaggagaatcatgcagaggattaatcttttccccaatcctgtttttgccggaccgcttaccgacacctcccattggggtgacgcgaatgggacggtccgtgataatgcgttgcacgtcacgggacagaatggcggatatggcttcaacgttaaggttccattcaacgttccgctcgtcctgtcgatgagagtggacgccagcgaagacaacgtcgcgggcgtgatggtcgtgcatacaactgataagcccaatattaataatacgttggtttcccaaagattcaagcgggggatatcgtatgtcttgtgcagattcacggtcccctcccacgggtttcgattcgaggtaaatccaaacggaatccgtgacgcggcggtatcgaatgtgctcatcgaacgcgccgacacgtatgaccctgccgttggggggggggcttccgggcttcttcacgggagacaccatgccgctcgcataggagcgtccgtcgggcgggtgatgcccgatgatggtcacgaacctatgcacgtgcccatcctcgaccatcgccctgaaagccgacaagtgggtggatatcacgaccatcccgaacaagccaggggtgaaatattgggtcagagcctacgtgaacgtcaccggcggcactatctcgatgagagcgtatggcgacatcatggcaagccagcatgtcagctacgcgttgaccgccaccgttgccggtccgatgtcaatgtattattccgtcaggtccggcaatccgaccgtcaccgtgacgcatattctcatctgcacggatgccgagtatcaggcgaacaagaccctgctcgacggcatcggatatttcaccgggaatacgatgccgcccgcctgaccctcttgggggtggcggcatgagctacatcaccaacctgtacaccgacccctcatgccgcaggaacttaagcacgtggcccaacggcagtggcgtgaatgtcgagcacatcgacgggcacttccgctacacgaataccggcaacaatagctggtcaataagcgactgggatagctggcgtgaattgatgagactgggccgtgtcgtggtcgtcgcctacacggccaccagcgggctgcgcgtgagtctggagtccggcacgccgctcgcctcgggcacgaccgactcgggctccacatggcaggcgtcgaagatcaatgtggacaacaaccgcagcgtctactgccaaggcagtggcagcctcctgttggaggccatggccgtgtacgagggcgacgattggccgaccgtacaacggctcctcccccggttcccgtggttcgacggctcgaccatgcccttgaacgccaactgatgaaaggaaagaaggccatgacttgaccggaacgatacccgtatgggcaacgatcctggtctccgtgatcaccacgtgcggcggcacggtcgccggatggatactgcgccgcatcgaccaattgggcaaaccggacccggccctgtcgaaaaggctcgatcaggtggacgcgagcctgacccagctcgaccagcgtctcgacccactgcagaatggggtgaaaaccatgctcctgtgcaaattggagcagatgcagcgtgagatggtcgacgcgggcggtatcgccgacaacgacctcaaaacccgcgccgaaggcgtctacgccacctaccacgcgcttggtggcaacgggcacggcacccaagtcaatcaggacatacaggacgcgccgatagccccgagaaaaccacaggcttagcccccgccgaccccgacgggggctatttcatgcccacccaacacacaggaaggaaaacgaatttgggcaagttcaaaaacaaaagcaagccgaaaccatggtataagcggctgctcgccaaagtcacggcgctcgtcgccgccgtgtgcatgctgacgctccctgcgaccgcgcacgcggacatgcagggcatcgacgcgtccaactggcagtgcggcatcgacatcgccggcacgcaggcggacttcgtggtggtcggcaccacatggggcaccggacaggtcaacaacatctgcctggcctccggcgtcaacaccgacgccaaccgcatgatcgcccaggcgcaggcgtccggcaaacggttcggcctctaccattacgccatgggcggcaaccccgaggccgaggcccggttcttctacgccaacacgttgaactattggcgtcacggcatcgtcgcccttgactgggagatggacgacaaccccgcatggggcgactgggactgggtgcgccggttcatggctgagtgtgaacggctctcgggcggtgtgcgcccattgctgtacaccggcccggtcgccggcaccatcccgcaggacatccgcgaccgatacggtttgtggatcgcccagtacgccaacatgagcccgaccggctatcaggccaacccgtggatgatcggcgcatacggcgaggccatgcgccaatacagcggcaccggtgtcgtcaacacgtggagtcccatcgacctcaacatcttccgtggcgaggcatggcagtgggatctgtacgccaacccgaccggcggctccgcgccaccggccgcaccggccgcgcccgtgcagccgagcgacccccagcccactcccagcactggaggcatcagccacgtcatgcagtggggcgagaccatctggggactcgccgtagcgtataacgcgtggccgttgtccatgtggcacacgccatccggtgatatcaaccgctactacgtgggcgatgtcgtcacctacggcggcggctctactgccacccccgcaccgtccaccggggtctccaagaccctccaatggggcgacaccgtgtgggatttcgccacgtcccacggctacagcgtcagccgctgcaccgtaccatccggcaacatcaacgtctactacgtgggcgacgtggtgacctgccgctaatccagaccgatgccgccacccgcataaccgggtgacggcatcaccccatcatcatcccttattgatcggagcaaacatgaccgacagcaaaaacacgaccgacaccggcgaaacgcttcccggcgccgatgtgagcgactggctcgagacagccgacgtcacccatgacgtgcccgactggctcatccccagccgcgtctacgacatcctcaaatggctcggcctcatcgtcctgcccgcactcgccctgttcgtcaacacggtcgggcccgcatggggctggccccacgtggacgccatcgtgaccacgctcaacgcgctcggcatcctcgccggcgcgctcatcggcgtcagcgccatcaaacaacgcatcgacctcgccgcataaccacacatagttcggcaccgcccggcatcgcaggcgactcgaatagagtcaacctgctgccggacggggccgatttcgcgttgtggcagagggcttcgcgggctcgatttctgcccacatcttgcccacattttccgtaaaaacaggttaaaaaccgttaaaactggttaaaacgaaaaaagccgctcagccctactcccgcaaggcaaagcggccattttccaacccgttctcagctcagcgcgtccttcaacttgctgaagaagcctttcttttggccagcctgtggacgggatgcctgggagacgtgcgtggcgcctgaatcgtgcgaggcggcgaactgttcgatgaggccgcgctcggtttcgttgagcttggtgggaatcagcacattgacgtgggcgatgaggttgccgcgctcgtccttgttgcggatgttcgtgacgcccagtcccttaagcgtcacagtgtcctcaggctggcagccggccgggatggacacggtcttctcaccatcgaacgtgtcaatggacagatcgtggccgagcacggcccagctcatcggcacctgaatccagcagtgcaggtcgtcgccatcgcgggtgaactgcttatccgccttgatgcgaatgtcgatgtacaggtcgccggcagcgccgccgccctcacccacttcgccctggttggccaaacgtagacgcgcgttgtcgttgatgccggcgggcacggtgacgcccacggtacgtgtggtacgcacacggccgtggcccatgcagctggggcacgggttcttgatgatggtaccgtggccctcgcaacgttcgcagggggcggaggtcatcatctggccgagcatggtgcgcacgaccttctgcatgaatccctggccgtggcagtcggggcaggtgaccggctgtgcgccgctctgggcgccggagccgccgcactcctggcacagggagaacgtgctgatcttgacgtgcgcggtgccgccgaacacggcggtcttcaggtcgatggacgcggaggccagggcgtcgcggccgggctgggtacgcggcaccgggccctgtgagccaccaccgaacgcggaaccgaagaacgtggagaacacgtcgctcatatcgccgaagcccgccccggagaagccgccggcaccggcgttcggatcgttcgggtcgacgcccgaatcatacatacggcgcttgtccggattggacagcacatcgtaggcgttgttcacttccttgaacttgtcctcgaattcagggcccgcgatgtcggggtggtacttacggctgagcttgcggtatgccttcttgatctcgtcgtcactggcgccgcgttccacacccagcgtctcgtaataatctgccacttgattgatcctttgtgttcgtttggtctgcgggtcattgtgccacagacggcggtcagtcttgggtccggccctcggagaggaaggcggtcaaatatctggctacggccctgacggcggccatagtggccgcatagtccatgtgggtcggccctatggagccgacgaaggcgatgggttccgtgtcgttcgtctggctctccgtctcggattcggtttcgggttcgcctacgggatcgttccccgccggttcgcccgccgcaccgctgcgcccatagccactgctgaccacggaggcatgcagtaggccgggggtgtgcatttcggagccgatggccacgcccacgccggatgcattcgtctcctcgctcaggttgctcatgagcttcatcagcacgacctgttcttccagcgcgtcgaagagcggggccagatcggccagggaccgggagtgggccaggtgcgaggtgccggacatgtacagttcgtccgcgcgttcgtccaatgccatcgattcgaaggcgtcggccagcgcgtcggccacgccgcgcaccgactcgtagccggcgctggcggcgatggatcgcacggtctccgcggatttcgatagggacagtccgacacattgttcgttgacggtgttggagagccggttgatctcgtccacggcgggcatggatgcgatggtcaggccgtgctgggccacgcggccggtgtcggtaatcaccaccgcgagcaacgtggtcatggcaacgggcaccatctccacgtgccgcaatgtggccttggccagcgatggcgaggtgactatggccacttgaccggtgatttcggacaacagtcgtgccgaacgctgcagcgcgtccttgagactcaccgatccggacaggaagctgttgatgccgcggcgctgcgcctcgctgagcggcaccacggtagcaagtcggtccacaaagtatcgatagcccttttcggtgggcacacgaccggccgaagtgtgcggctgaatcagatatccttcatcctccagagcggacatgtcgttacggatggtggccgaactgacgccgagatcatggtcgcgcgtcagcgaagtggagcccacgggctcctgagaacggatgtaatcctccaccacggcgcgcagcaccagcatacgtcttgattgcgtcatgcgcgcctccttatatatgcatgcatattcatatcagtcacggttcactcagggcgtaccccgacggtcggttcgccacgccgcgacacgcgggaacccagaaatattgcctctttcttggctccgccacgtgcaggtggcgcacttcaccttagaacattgtattagcactccttaggcttgagtgctaatgcgttcgtttgcagcgtagcaatgttcactgtgaacgctaacagaacacaaactaccaaaacacgccaaaattgcaccgcaacgtcgcaaaccgacgctagcatggtaatcgcaatgtgagggcgtcaagcgcccggcacaagccggatacgcggcccgaccaattggaaggaaagtaatccatgaccgaattcaaggagaccgagctcgacgagcgcgccatcaagatggcgaaggtcctttcggctgacgcggttgagaaggcaggctccggccaccccggctcccccgtctccctggcgcccgtcgcctacacgctgtaccagcacttcatcaagcacgatccgaatgatcccaactgggaaggccgcgatcgcttcatcctttccggtggccatgcctccctcacccagtacgtccagctgtacttctccggctacggcgtgaccctggacgaccttaagaacttccgtggcggcgctgccacccgcaccccgggccacccggagtacggcctgaccccgggcatcgaaatgaccaccggccctctgggccagggcttcgcctccgccatcggctttgcctacggcgagcgtttccagcgcggtctgcttgacccggagaccccgaaggaagattccccgttctaccacaagatttgggccatctgtggtgaaggcgacatcgaggagggcatctccggcgaggccgcttccctggccgccaaccagaagctcggcaacctgaccgtgatcttcgacgccaaccgcatccagatcgaaggcgacaccaacctggtgctggccgaggacgtgctcaagcgcttccaggcctacggctggtacaccgacgagttcagcttcatccagcccgacggctcctacaaggaggacatcgagggtctggccgacgtcatcgccaaggccgaagccgccgccccggaccagccgaagctcatcaaggtccactccctgatcgcctggccgaccccgggcaagaccaacgacccgtcctcccacggctccaagctgggcgccgaggccgtcgccggcctcaagaaactcctcggctacgatccggaggaatccttccacgtcgacgaagaagccctggcccacgcccgcaaggtcgccgatcgcggcctggaggcccacaaggcctgggacgagaagttcgacgcctggcgcaaggccaacccggacaaggccgccctgtacgaccgtctgaaggccggcgaactgccggaaggcttcgacaaggcccttgacgaccttgaggccaccttcgaagtcggcaagggtgtcgccactcgtggcgcctccggctccgtgctcaacgccatcgccgccgtcatgccggaactctggggcggctccgccgacctcggtggctccaacaagaccgacctcaagggcgctgccaccttcgccccggccgagtgcgccaccaagcagtggccgaactgcaacgagttcggtcgccagctgcacttcggcgtgcgcgagttcaccatgggctgcatcaccaacggcatcctgctgggttcccacacccgtccgttcggcggcaccttcttcatgttctccgactacgagcgttccgccgttcgtctggccgccctcatgcagatcccgaacctgtacatctggtcccacgactccgtcgccgtcggcgaggacggcccgacccaccagccggttgagcaccttgcttccttccgcgcgattcctcagcttgaggtcattcgcccggccgacgccttcgagaccgccgaggcttaccgttacttcttcgagaagaagaacaccctgcctggcgccatggttctgacccgtcagggtgtcccggttcttgccgagaccgctgccaaggccaaggacggtgtcaagaagggcgcttacatcctggtcgacaccgagggtactccggacgtcatcctcatggcttccggttccgaggtccagtgggctgtggctgccgccaagaccctggccggcgagggcgtcaaggctcgcgtcgtgtccgtgccgtccatggaatggttcgaggagcaggacgccgagtacaaggaggctgtgcttccggccgctgtcaaggctcgtgtctccgtcgaggccggcgttgccatgccgtggtacaagtacctcggttcctacggcaagcctgtctccatcgagcagttcggcctgcagggtgacggcgctcagaacatgatcgacctcggcatcaccgccgagcacgtggtggaagccgccaaggcctccatcgccgaagtcgaagccgccaagtgagcaactaagcaataattcaataattgttggctcccctccctgaggggagctgtcaggcgaaagcttgactgaggggagcaatgcttgagcccactcccctcagtccgcgttgcggacagctcccctctcccaggagaggggagcctagggcttgaatccaaggagaaaataaatgactgaagcaactcagcgtacgtccgacaacggcgtttccatctggctggacgacctgtcccgctcccgcattgagtccggctccctgcaggacctcatcgccaacaagaacgtggtcggcgttaccaccaacccgtccatcttccagaaggccctgagccaggtcggcccgtacgacgctcagctcaaggagctcggcaaggttgacgttgagaccgctgtccgcgagctcaccaccaccgacgtgcgcaacgccaccgacatcttccgcgagatcgctgaggctaccgacttcgtcgacggccgcgtctccatcgaggtcgacccgcgtctggcccacgacaccgagaacaccgccaagcaggctgtggaactctgggagaaggtcaaccgtccgaacgccatgatcaagattccggcaaccctcgaaggcctgccggccatcaccgccaccctggccaagggtatctccgtcaacgtcaccctgatcttctcgctcgagcgctacgagcaggtcatcgacgccttcatcgagggcatcgcccaggctgacgccaacggccacgacctgaagcacatcggctccgtcgcttccttcttcgtctcccgcgtggacaccgctgtcgacaagctgctggaagccaacggctccgacgaggccaaggctctggagggcaaggccgctgtggccaacgctcgcctggcttacgagctcttcgagaagaagtttgccgaggatccgcgttgggccgacctggctgccaagggtgccaaggttcagcgtccgctgtgggcctccaccggtaccaagaacgccgcctactccgactgcaagtacgttgacgagctcgttgccaagcacatcgtcaacaccatgccggagaagaccctgaacgctctggccgaccacggcaacggcgctccgtccatcgagggcacctacgaggagtcccacgccgtcatcaacaagctggctgagctgggtatcaacctcaaggacgtcactgacaagctggaggccgacggtgtcgccgccttcatcaagtcctgggattccgtgctggctgacgtccagtccggcatcgaccgcgtgaacgcctgagattattagctgatgcgcatttcgcgcattaactgattagctcacagaagctccgaccccaaccggtcggggcttcttacgtttgttgctacagtagtacgagcacatgagagaaaggccgaaccgtaatgaacaaacttgtcgcacgccagcggttggtgatgacctttaccttcttttcgatgttcttcggagcgggcaacctgatcttcccgccgtttgtcggagctcaggccggttccgcgaccataccggcggccatcggcttcatcgtctccgcggtcggcctgccgattctcggcgtgctggcggtcaccttcgccggtggcttcgacaaactcgccggccgggtctcccccaaattcgccctgttcctcggcttggcgatcatgctcaccatcggcccctgctttgcgattccgcgtacggcgaccacctcgttcgaaatgatggtggcgcctttcgtgccgtcctcctacggctggctggcccaactcatctactcgctcgtgttcttcacactggcgttcctgttcgcccagcatcccgaaaaactctccaaagtgctcggccgattcatgggaccgttgctgctggtgctgattgccgtcctgttcatcgcctgcctaatccacggtatcggtaccccggccaaaccgatgggcgactactccacaaaccagattgcacgtggcttcctcgacggctaccagaccatggatctgctcgccgcgctctatttcggcatcgtgatttccgcgaatatccgcacccagcaggtcgatgacgaatcgcaagtgcagaaggagaccgcgtatgccggactcggcaccggtgtgctgctgatcgtgatctacggcgcactgagctacgtgggcgtggtgtccggcgccatcgccaccatcgatcccgccaaagacacgggcgcgaccgtgctcaccaatctcacctcgtccctgttcggcgcgttcggtaccgcgttcctcggtatcgtcttcgtcatcgcctgcctcaacgtatgcaccggactgatcggtacctgcgccacctacttccacactcggttccagaccgttgcagggagaacgttgagctaccgcacctggcaggtcatcttcaccgtgttcagtttcatcgtgtccaacgccgggctaagcgcgatcatcaaggtttccgtgccggtgttgtccgcactgtatccgatcgccatcgtgctggtgctgctggcgctgacccacaagtcgctcggcgcgcgattcccgcatgtctacttctggaccgtgctgctggtgggcatcgactccttcgccacctgcatctccagcctaatcaccgtcttcggcggctccatcggctggctggacacgacgctggccatgctgcccttgcagcaataccagctcggctgggtggtcccggctatcctcggtgttgccattggtatcgccgatgctccgcgacggtagttcttcccggtctgtgccggagtctggcggtcggtcggtgatggcggttgttgcgacgctcagcggtgccggtgtatcgttcgcaccactatatgagcgcatttggggcggcatgatgctgcatccgaactgtctggcgattggcagaatgacctactatctctcgggccaagcaactgacgattatggagtctgcgtcacctcaccactgtggtttatgacggtgactgcgctgagtgttgtcgcgattctctgtctgaccgttgcgggagtacagggcttttcgcgccatcggctctgttcccgttgccctggttctggtcaggtctcacgttctttacctacagctacaacactggtagacacaccgatttctgcccagcgctatcggcaactgacaatgcaggtcttgtcgcttattgcatcggccgtgaagctttgggactgctgaccgtcgtgttgtgcgtgctgccattgttctccctgctttcggcgattatggccatcacgttggctgcgcacgacgcgacaccaccggcataaaatctccttcatatcacgaaacaacgggcacccgttttgcgaggcattctatccgtcccgtgtttcgcaacgcatgagacggcacatccattgaatcaggagtctagaccatatctcgccgaatcttgcggtaggtggcatagaacaggaagccggccacgatgccggaggtggcgtcggagatgggttcggtgatgaagatgccgttgacgccgatccagtgcggcagcagcagcgcgagcggcacgagcaggatgatcttgcggaagacggccaagaacaccgactgtttggcctggcccatgccgacgagtgcgcattgcgcgcccatctggatgccgaagataccccagccgcagacgaaaatcggcatcatgcgggtcacgatgtcgatgaccgtctgttccgaggtgaaccatgaggcgaagaagccggggaatgtggcgagcacgttcgcggcggccgctcccctgacgccccatccgaacacgaaaatgaacacggggtcaagaaggatggatatgccggtgccgatgagtacggagaccatggccacagtggtttcgccaactgcagcagcacggtgagggtcagggctatggcgatgaggaacgcggcgctggtgccgaggatgcgttcggctttcttgaagttgccgcgcccaagttcaatggaggcgcgaggcgcgccgcctgcgccgatcagcgaggcgaaggcggtgacggccggcagaatcgggaagcagatgcccacgccggtcatcgccgcgttgcccacttcggggatgtgctcgatgaacagtcggtcgatgatcgtgtacgaggcgttcgccgcctgcgccacgatggtggggaccgacatggtcagggccagacggggcaccggtttggtgcccagcccggcatcgatcttgttcgcctgtaccaaggatcagctctgccagtagtagctgaagaagtcggcgagctcccccatggtttcgtgcagcatgcccatgcgcggcaggtacaccacgcggaagtggtcggggcgatgccagttgaacgcgccgccgtggctgatgaggatgtgcttgtcatgcagcaggtcgagcgcgaactgctcgtccgagtggatgttgaagcgtttgacgtcgatcttcgggaagatgtagaacgcggccttcggcttgacggcggtgatgccgggaatctggttgagcatgtcgtaaacgaggtcacgctggtcgtgcacgcggccgcccggcacgatgtagtcgttgacgctctggtggccgccgagcgcggtctgcaccacggactgggcgggcacgttcgagcacatgcgcatgttggcgagcatgttgaggccctcgatgtagtccttggcgatacgcttgttgccggacaggatcatccagccgatgcggtagccggcgatcatgtgcgatttcgacaggccggagaaggtcacgcagaacaggtccggggccatcgaggcgatggagatgtgctgcaggccgtccatgacgaggcgatcgtagatttcgtcggagaagatgatgagctggtgttcacgcgcgatgtcgacgatctgctggagcacttcctttgggtaaagtgcgccggtggggttgttcgggttgatgatgacaatcgccttggtgttgctggtgatcttggagcggatgtcatcgatgtccggataccattcggactgttcgtcgcacaggtagtgcacggcggtgccgccggccaggttcacgcaggcggtccacagcgggtagtccggggagggcacgagcacttcgtcgccggtgtcgagcagcgcggacatggacaggttgatgagctcgctgacgccgttgccggtgtagatgtcgtcgatggtgacgttcgggatgttcttcagctgcgcgtactgcatgatggccttgcgcgcggagaacaggcccttggacggcgagtagccttcggtgtcggtgagctggtgggccatgtcatagacgacttcgtccggcgtgcggaagccgaagggtgctggattgccgatgttcaatttcaggatgtgggtgccgttggcctccatgcgcatcgcctcgtcggcgaccgggccgcgcacgtcgtagagcacgttgtcgagcttgtgcgatttgccgaaggtacggcggcggcccacgggaatctcgctgtccgtcaggggcttggcggtgcccgtggcaagcggcgtggcggcgtgttcgccgtccgtgacgctgttggaagcgtccgagttcaattgcggggtggattcctcgccgcgcagccagttcgcgtcgacgtccagttcgctggccaggaattcgagcacgtcttcgcggggcatggtcttgccggccacgtattggctgatatggctcttgcccatctttacgccacgatgttcggcggcgtgcaccaaatcgacctgcttcaatcccctactgttcatcgcattgcgcagacgttccgcaaacaccgatacgctcatatccttatgcctccaaccgggagttcaatttatcttttgaacaacagttcaaagcatactcccggttcaacacaagttcaattttggcgtgttctcgagtctcggccggttcagcccaactgcgcttcaatccattgggcgacgccgtcctcgttgttgggcgggcagatctcgtcggcgatagacaacaccttggggttcgcgttggccacggccacaccccggccggattcgctcatcatgttgatatcgatgaggtcgtcgccgaaggcggcggtctgttcgagcggcacgtccagtcgttcgcacagcaggtgcagcgcgtgctccttgttggcctgcgggttcatgagcatccacatcacgccttcgctaatggagatgtcgaagtccggcggaatcagcgcacgcagctcgttccactgttcaggctcggggaagatggtgatcttatccgccacgccttcgggcacgtcgtggaagttcgtgtattggaaggcctgtgttttccaatacacgcgcacatcgaagttggtgtagcgcacgtcgttcatcacgatgccgagcttcaggccgggcatgcgatcgagcaggaacagacagacttcgcaggcacgccgtgaggagaagccaatcttgatcaaatggttctcatcggccggcgtggcacctgaggtgagcaggtcgaagtcggagtgggccgggtcgaaatcgatgagggcaccgttcagatagattacggcgtccaccggcagtttttcggcgaactggaggccggtactcaccggccgcgcggtggcgatggcgaatttcagtccggcatcgtgcgcgcggttgatggtgtcgatgctgcgctgggtgatgaaccggtcctcgaatacctcggcgtcgtgcagcaacgtaccgtcgaggtcggcgaccagcagtcggggttgtttcggtgtgatggcgtcgagaatcacagcagcccctcgcagtgttcacgcacgagttcggcggaatggtgcaatttggcctgctcgtcctcgctcagatcgagttcgacgatctcgttggcaccattggcgcgcagttcagtggggacgccgaggaacacgtcatgttcgccgtattcgccgttcagcagggtggagacgggtacgatgcggcgttcgtcccacaggatggtctgcacgatgccggccacggtggaggcgatgccgaagttggtaccgcccttggccgcgacgatctcatcgccacgggtgcgggtcttctcttcgatttcggtggtggacacggaggcgaaacggtcttggttgtcggccaggaagcgggcgaatggcttgccgccgagcgagacggtggaccatgcggtgaactgggagtcgccgtgctcgcccatcacgaagccgcccacgttacgcgggtcgaggccggtctcttcgccgatgatggtcttgagacgcgaggtgtcgagcgcggtgccggtgcccagcacctgggtgcgcggcaggccggaacgtttccaggcataccaggccatcacatcgaccgggttggagaccatgacgatcacgccgtcgaagccggaggccatgacgttgtcgaccacttcgcccacaaggcccacggtgaagccgagttcggccatgcggttggagttggccggcggcttgcggcccacggtgatgacgacgatgtccgcgtccttgcagtcggcgtagtcgccggcgcgcaccttgacgtggcggtcctggaattcgctgccgtcatcgaggtcgcgggcctcccccagggctttggcggcggagcggtcgatgagcacgagctcattgcacaggccgtgcgtgacgatgccgaaggcggcggtggcaccgacctggccggtgccgacgataacgactttgttgcggttcatagtgaccatggtgatgtcctttcgtaatactcgatagaacgcatacgacccatgaccgacggtaacggtcatgggtcgcgagcgacaagtctatatggcgtgcaagccgatcagccgaggttgaacttggtcatcatgtcgaggccgatgatcaaggccacccacaccagagcgatgataacggtccaacggttcaggttcttttcggcgacaccggaagtaccggcgttctgggtcagaccgccgccgaacatgtcggacaaaccgccgcccttgcccttgtgcataaggatgagcagggtcagcacgaagctgagcagcacgacgatgacttgcagcgtgatcttaagagcggtcacagggtacctccggattgattggactgttgaccagcatagcgcacacacgggaaaaccgtggtattagttccgtgatttcgtggatttcagtgccagtcgagcgattttggcgagttcctcaacatccagggccgcccctccgatcaggaagccgtcgacgtcgggttgggaaatgagttccgccgcgtttttcgaggtgaccgatccgccgtacaggatacgtacgctatcggataccttcgtgccaaaagtggtcttcaaatcgttgcggatggcgtttgcggcatcctgggcggattgcggagtggccaccatgccggtgccaatggcccagacaggttcgtaggccacgatgagttcggcggcttgttcttcgttgagatcgcgggtgacgtctcgtacctggcccacggcgaaatcgagttcaatgccttgacgtcgttcctcgaagctttcgccgacgcacaaaatcggctgcatgccggcggcgagcacggcacgtacctgatcgacgatattggcgtcatcttcaggatggtatttgcggcgttcggagtggccgacgatgacgtacgagcagccgagatgggcgatcatgtccgcggacacatcgccggtgaaggcaccttgggtggtcacggaaacggattgtgcgccgtaggcgacatggagcttgtcggcttcgaccagcacctgtacgctgcgcaatgacgtgaacgaggggaaaagcgcgacttcgcagcgtttgaagtcaaagcgagcgtcacgcaacagccataccagcttctgcacgaagtaagtggcttcaagatggtcgaaattcatcttccagttgccggccaccaacggaatgcgtttggacgccatatgtttcccttctaaaaatacgtagctcccctcaaggaggggagctagaaaatggattactcaagcaccttcagaccagggagctccttgccttcgaggaactcgagggaagcgccgccaccggtggagatgtgggagaagccgtcctccgggaagccgaggttgcgcacggcggaggcggagtcgccgccaccgacgatggtgaacgcaccggctgcggtggcgtcgaccagaccctgggccacggccttggtgccggaggcgaactcaggaacctcgaacacgcccatcgggccgttccacacgacggtcttggagtcgacgatcttgtcgtggaagagcttctgggactccgggccaatgtccagacccatcttgtcggccgggatggcgtcggcggcaacgacttccggagcaaccggggtgtcaccggccgggaagccggcgttcacgacgacgtcggtcggcagcacgagctcaacgccgttcttctcggcggtctcgatgtagcccttgaccttctcaagctggtcctcttcaagcagggaggtgccgacctcgtagcccttggccttgaggaaggtgaacaccatgccgccgccgatgaccagacggttggccttgtcgagcaggttctcgatgacgccgagcttgtcggagaccttggaaccgccgagcaccacggtgaacggacgctccgggttctcggtggccttggacagggccttgacttccttctcgaccagcaggcctgcggcggccggcagatcggcggcaacgtcgtagttggagccctgggcgcggtggaccacgccgaagccatcggaaacgaaggcctcgccgagggcggcgatcttcttggcgtaagcggcgcgttcgtcggcgtccttagaggtctcctccgggttgaagcgaacgttctcaagcagcacaacatcgccatcgttcatggcggcgaccttggcctgagcgtcctcgccgtaggtgtccttggccagcggcacgttggtgccgagcagctcgccgaggcgggcggcaaccggggccaggctcagctcaggaacgaccttgcccttcgggcggccaaggtgggccatgaggatgaccttggcgccttcttcgcgcagggtcttgatggtcggcagagcagccttgattcgaccgtcatcggtgatggtggtgccgtccagcggaacattgaaatcagcgcgaaccagaacgcgcttgcccttgagatctccaaggtccttgagtgtcttcatgaatatcctttccttgacgaatcgcacgtcaaagtggccaattttgccactttgcatattacaggcattccggaacaaaacaccgcattcgcctactgactgaatgcggtgtttcgttacgtcgttgtcgggttacttgccttcggctgcgcgagccttctccgttttctcggcaagctgaagcagtcggcgaattcggccggcaatcgcatccttggtgatttgcggttcggcgatcttgccaagctcctcgaggctcttgtccacgtgatcgatgcgcagctggccggcctgacggaggttgtccggaatgttatcgccgagcacttcgaaggcatgctgcactttttcgctggcttcggcggcagccttggcggaacggcgcatattggcgtcatcgaagttggccagacggttggccttgccgcgggcctcgccgtcggagcgcttgccggtccattcgcgggccgaacgggtggcgcccatgagcttgagcatgcgttcgatggcgtcgggatccttgagggtcacgcgctcggagctgcgcagcgtgcgatgcttggcctggatgccgagacgacgggccacgccacacagggccatggcggcctcttccgtggggcaagcgatttccaggaagctggccttaccgggatcggataggaagccacgggccatgaaggcgccgcgccatgctgctttgatttgggcgatggatccgttgaccacttcagacggcagtccacggacctgctgcttgcggcggtcgaccagtccggtctgcaaagccaaggccactacgttgcgggtgacgagcaccacgtaggtctcgacagggccgttcggggtctgacgggtgaggtggttgacctcggcttcatgcccgaacgtgttcctcaacgtgttcttcagccattctgcaacgtcaagcgaggtgaatacggcttggataacgtatgtattctgtaccggtcgaagaccgccgccaaaacggatcatggccgcagcttgggccttgatcgcggctggcgaatcgccttcaaaggccgccaactcgcttttgacatcgtccagaagagccaagatctacctcctacagtcccgttcttctcaatgcttcaggcgcttcgtgccgttatctgctgtcatacggtcggaagccatcggctttctgtgatacctaatctggtggacaagcgaacccgtttgatacgtattatgggctttgctttctcgcagtgtggtcaccgaacgcttgcccgatgaccgctcgacgcctgcttacgatgagtgacgcttatgctgttctctcgcggaaacggttacgttgagcccatgtgcgcgtaagcggcgagccagctcttcgctcatcgccaccgaccggtgctgaccaccggtgcagccgacggcgatggttacatagtgcttgtcttcctgggcgtatccttccaacgcaatctcgatagctttctcataagcgtcgagaaattccttggctcccttgctggaaagcacgtagtcggcgaccggcttgtcgtgcccggtaagctcgcgcaggttgggaacccagaacgggttgggcagaaaacgcacatcggccacgaaatcggcgtcgatgggcatgccgtatttgaagccgaagctgaagatgtgtaccgccacggtggtggggccggaaccgagcatcgtctcgtagagtttggtggacagctggtggatgctcagggagctggtgtcaatgacccagtcggctcgctccttgaggtcttccagcaggtgacgttcctcaaggatgccgtcgatcagtcggttgccgtgctgcagcgggtgcgggcggcgcacggattcatagcgcttgatgagcacttcgttgctggcgtcgaggaacagaatatgggttttgacgccgagatcgtccagatggccgagcacggcggccagctcgtcgaaatagctggagcgcacgtcgatgacggcggcaagcttgtggacgcccgaccccgatccggaaccggaggtggtcatcatgtcgacaagcgggataagcagtttgggaggcaggttgtcgaccacataccatcccatgtcttccacgcagtcagcggcatgagagcggcctgcgccggacataccggtgatgagcagcacctcgaaggcatcaagcggggtcggctggttgtccggagtcgatgtggatgtcgcggaattcgccggcgcattcgtggcggccgcctcgccggtatcgcggattgttgtctgttgactcattacaacgcctcctcaagagctttgcgcatcgcgatctccagctggtcgtcttcggtggtggtgtcctgcagacgctggtcggcatcgctgggcgggtcgtcatcccagataccggtcatcagcaatacctgtacgagagcttggtacagcagcatttcttcaccgccgatggcgtgaccgccatgagcgcgccaggcttccatgagcttggtggggcgtggatcgtagaccacgtccagcagcagtccggagaatggctcggttccggcattggtgagggcatccgcgacgttgtcggccgcatgtccgggaatcgtgttgatgacataggtggcgttgcgggctgcctcgagcagggcctgatcgtcgcctaattcgatttcgctgtacgggttatgcacgttgacgaacttttcggccactggtttaagcccggtgtttttcccagggtggcgggcggcgacgatgatatggccgatttcgggcatcatgcagcatgcggccaacgccgaagtggcggtgttgccattgccgaggatcagcgcggcgccgcttctcgatgcggtgtggtgttcgccgagttcgcgattggcgtggtcgaaggcgagttggatgccgatgacatcggtgttgtacagcttgatgcccggcttgccgttcggccaagcgggatcatcggtagccacactccagtcgaataccgcggtattcgccaccttcagttccttggcccacagattttccggaacaccgtacggttggatggtcttcttcaacggcatggtcaggctcaggccagcccacgtcgagccaaggcctttgaggaaagcgtcgaggtcgtcttcccccacctcgtgcttgtcgtacagccaatcgtcgagtttcagcgaacgataagccgcgttgtggagcacgggtgacaatgagtgcgcgacgggtttgccgagtacagcgcaacgatgattggccatatcccctccttgatgtctgtttccatgctagccgacactttgcttcgaatatgtcaaccacaggccccgcaaccgaaaattcactctgggctgctggaccgggccggctcactgctcgtgcagcgcgttgtacagcgctttggctttggcgtggccgatgcctttgaccttctcgaagtcctcgacactggcttcgcgcatggctttgaccgagccgaagtggttgagcagccgcttctggtagctttcgccgatgccgggaatctcgtcgagcgcgctgcgcagggcgcctttgcgccgctgttggcggtggtaggtgatggcgaagcggtgggattcgtcgcgtacacgctgcagcagatacatgccttcggactggcgtttgaggatgatcggatagtcgtcgtccggcacccacacctcttccaagcgtttggccagtccgcagacggccacgtcgatcacgccacagtcctcaagcgccttggcggcggccatgacctgtggcttaccgccgtcgaccaccaccaggttcggcgtgtaggcaaagtgatgccggtttgtgttctgctggacgatgtcgggcgaggactcccgtgcatcgttctgcactccgaccggcaccgcgtgccccttgccactgatgtcggaaccgccctcaccattgtcgttaccgttcgcaacgattgtctccgccgccacggcagtggtcatcttgccggcggccgaggccgcgcgctgttccgcgtcgatgctttcgccggagtcgccggcgatgttgccgtgcctgaagcggcgggtgagcgtctcgtaaagcgcggacagatcatccaccgcgcctttgccgtccttgcctcggacggcgaagcgtcggtattcggatttcttggcgatcgcgtcttcgaacaccaccatggaggccacttggaaggcaccgcccacagtgttcgaaatgtcgtagcattcgatgcgcagcggggcttgcgcgagtcccaatgccttggccacatcgttcatggcctgggtgcgtgcgcccatgtcggagatgcggctcatcttgctgcgttgcagtgcttggctggcgttctcgttggcgcggtccataagctgcttcttgtcgcctcgcgaggccacgcggatggtcaccgcgcccccgcgcagattggtcagccagccttcgagttcctcgcggcgggccggttcgacgggcacgatgatttcgcgcggtaccggtgcgatgggtgccagcaggtccgcgcgtccggtggtctcctgacgggtgttgcgttctcgggtggcctgggcgcgtgccacagcgtccgtggccgtgatggtctgtgtggagccgatggcctcgcgattggtggagatggtcgcggccgactgggggtgattgtccccggcggcgtccgaatacacctgcaccagaaggtcggccatcaagtcggcgtcatcgatgtcctcaactcgttcgacgctccagttgcgttcgccgcgaatagagccggcgcgcacataaaaggcgtgcaccgaggcttcgagctcgtcgctggcgaagccgaacacgtccgcgtccacatcctggtcgaagacgacggcgttctgttgcaccacggtttccagcatttggatctggtcgcgcagtcgggcggctttctcgaattcgagttcggcgctggcctctttcatgtcgcgggtcaactgggcgatgtatggccgtccgagtcgtccggtcatcacgccgaccagctgttcgcacagccgccggtgttcgtccgcttcgatacggttcacgcagggtgcggagcatttgccgatggaggcgaacaggcatggccgtccggtcagttgcgccttgtggaatacgttggtggtgcaggtgcgtaccgggaacgtgcgcagcaaccggtcaagactgtgccgcaattcccacactttggcataggggccgaaataccgggtatcccgccgtttgcgcgaccgcgtgacccacacgcgcggaattcgctcccccgtgctgaccgcgagatacggataggtcttgtcgtcgcggaactgcacgttgaaccgtgggtcgaattccttgatccacgtgtattccaacgtcagtgattccagttcggtggcgacaaccgtccactccagactgcgtgcggtcagcaccatggtctgcgtgcgcggatgcagcagatacagcggctggaaataattggtgagcctgttgcgcaggttcttcgccttgcccacataaatgacgcgcccttccccgtcgcgccatttgtacacaccgggtttggcgggaatatccgaggtcttgggtcggaacaggtcgcgagaatcccccagcaaaggtgccccattcgcattcaccttcgccgtcgtttccccggcgcccacagctacgctttccggcattaacgccgccgcggtcttccgccactcatccggactatgccgctcaatatcgttcgtcataatcctcctcgctattaagcaaaaccaatcatcagggattgggtgggttggggtgtgtgttgccggaccgtaaagacttggcctgagcggcccggagc

SEQ ID NO: 3102 - DNA, 20765 bp, Unknown
  R215_18m  MAG No. k141_7663
actccggacaggatgaaaattgaatattcctgcgtagctcagttggcagagcatccgactgttaatcggacggtcactggttcaagcccagtcgcaggagctcacctgaacgggtaactccggacaggatgaaaattgaatattcctgcgtagctcagttggcagagcatccgactgttaatcggacggtcactggttcaagcccagtcgcaggagccatcgaaagcctcggttctccgaggcttttttattttcattgcattggtgaccagacacgacaccccatcatcaaccgggaaatccatggcgaagacctcaccactactcacatcaggcagacaggtcactgtcaattcaccgatgagaggcacggtattcccagtatcagtctgggaataccgtgcaaatcttacatcgagaccttggtcaggggcatggcggagtcgatcgggaagtcgggggcgctgggggccacgccggcttcgaccaggttcacgccgagcatggcgaccatggcaccgttgtcggtgcagagcttgatttgcgggatacggacgtcgacgccgtagttctcgccgaattcgagcagtttggcgcgcagctgcgagttggcggagaagccgccgcccacgatcagcgtgttggaatcgtactgccggcagccgcgcatggccttacgggctagcacggtggccacggagtcggccagggatgcgcacacgtcgtccaccggaatctcatggccggcggcctgctcgctttccacccaacgggccacggcggtcttgacaccggagaaactgaaatcatacgggtgcgcggcaccggccttgccttgggtcagacccatcggcaccttgatggcgtgcgggtcgccgttttgtccgtggcggtcgatgtgcgggccgcccggatacgggaagccgagcagacgggcgactttgtcgaagcactcccccgccgcgtcatccagcgtggtgcccaccacatcgatcttgcgcggcatgtcctccacatgcagcagcgaggtgtggccgccggagacaatcagagccagcgtgtccttggggaacgggccgaactgcagctgagtgacggcgatgtgcccgatcacatggttgatgccgtaaatcggcttgttcgcagcccaggccagcgccttggcgccggacacgcccacggccaggcaaccggccagtccaggaccggcggacacggcgatggcgtccacgtccgccaacgtcatgttcgcgtcggcgagcgccttggacacgcatggcacgaaggcctcagcgtgcgcacgggaggcgatttcggggatcacgccgccgtatcgcgcgtgttcctccatggatgaggccacgacgttggagagcagttcgcggccgcgtacgatggcagccgcggtttcgtcgcaggtggattcaatgcccagtacaaccggttcgctcatcgtgcttctccgttcttctccgtttgcttgccagtgatgtcttcagtgtccgccgatgccgtctgcggggcggcaaagcccacgaccctaggtttcaggtccaggctcatggtgtatgcgtcgatgccttcaggctggtagtagcgtttgcgcaatccaatgcgttcgaatccgaaccggtgatacagggccagcgcagggtcgttatccacacgcacttcgagcagcatgcgcgaggcgccctgacgcttcgcctcgtcgaccagtgcctgaagcaacgcagcggcgatgccttgccgctggtatgccttgcccacgccgatggtcatgagctcggcgtcctcgccgtcataccagaagccggcgtagccgcggacaaccgcctgttccacctctcccagcacatccagcagatacgtgcgggccggtgcgtccagttcctctcgcaccatgttcgcattccatgcgccgaggccgaacagttcgccttccaactgtgcgatggagcaaaccgcaagatcacgacttacggcagtgatgtcaacaatcatcgaatcaacccgtctcacgccttatcggcaccggcatggccgagcacgtgcttcagcgggttcggcacttcggcgtccggccggcgcaggtacaacggttcgaccggcgtatcgtgattacggttggcaaccagttccgcatcagtggcaaagatagcgagaccttgctccccttggtccaatacggattcatcggtgatgtcgccaagctgctcgattgcacccagcgcatccgcatatttgcgggccccatgacccacaacatccacgaccacatccacattgctgtcttctggtctaagtccgtcgcggtacgtatgaacggcatcattcacgcgctgcgcgatggatgcagggtaatcgatatccatgtcaatcagagccgtcgccacggtttcgccatcgggatcgccaacgagcgggtccgagtacaacgcaaaatagagttgcttgcggcgtgcgtcgtttacggcaagagtgagcacatggcatttatgagtatcgccgagagtgccggctttgccacggcgaatgagattccattgcacctgagactcaagaacattatggccgataagcgtcgctcccgttgcgaaagccagtgccttggccgtaacgataccggcacgcagaccagtaaagggggctggaccggtacccacaatgactgttgcaatgtcagatgctgggaacccggcctcctcgaccgcgcgcgcgatattgacctgcagtttctccacatgggtgcgcgaatcggtctccacgatgggctcgcgccccacaatgccgaccgtcgagccgaatgaggtgtcaatcaccaacgtgcaacccatgaatcctcctagtcgtaaagcctctagagagtgtacatcgaggagtctataggcgcatggcttactgcagatcgaacgcggcccatcgcttgccgactgggacgaatgcgacggtacgagtgccgttgctggtgagttcgccgtctgatccagcggatgcggcatcggaggaatcgagaggtcgatcgatatggatttcaagtcgttctggcgccaaggcggtggccatttgttcgccccactccataagcaccaccgtgttctcgccggggtcttcaagttcttcgtccaatcccagcgattccagctcgtccaacaaacgcccgatggcgtcctgccccggcgcataggctgagccgcccagacggtaggcatccacatgcaccagatgagacggagtgccgtcggcgaaatgcccgtcgagttcgcgggcaatggtgaatgtaggagacacgatgggttcggtaatgcccagccccgccccgaagccctgggcgaatgtggttttaccggcaccaagagggcctgagagcagcaatacatcgccgccgtgtaccattccggccacacgacggccgagctcctgcatggcctcgctggtgggagccgcaatagtgtgttcgctcataaatacccctttatcgacttttaccgacctttatgactgatgtcttcaatgcagcgttccagcgcatataccgggtcgccaccgtttgttttgctttgctcatccgcccaggcgagcatacggatgcaatgcgcgagtcctgccgaagtccagccgccaagttggcgcatcgcattcttcagcacccacggattggttttcgcttcggcctgggaaatcgtgccggcccgtaccgccgaggctttggcaatggtacggagcttcatggccaacgcgccgatcagcgcgatgggatcggtcccttgttccacagctgcacgcatcatgacgatggcttctgcggttttgccttccacggccttgtctgccacggcaaaaccggtgacctgcggattggcggtcaaatactggttgacacggtcgaggcccatcggattatcgtcaaagtcgaaacacagttgctcgcacatggcggcgagttcgccggttttgccgccgagcacggataccagctgctgtgcggccatcggttcgactctacgaccacgtttctcgaattctccgagcacgaaattgagctgtgcatccggtttcttcaaatccggcacgtcctctttgcgagcgccggctttcaccagttggtcgatgattttgcgccctttgacgccgccctcgtgctggcagatcaccacgctggagccgttcggatccttggcggcctgcttggtgtacgccaccagagcttcggcgagcttgtcgtcggcattctgcaggttgacgagtttgaccacggcaacgtcggaaagcaacgatgggctgacggcttcatcgaaggcatactggtcggccgatgcggcgtcgagttcgatgaggtcggcgtcgggccgcgccttcaacgcctgcgcgcacagtgccttggtgcgtgcgtcgttcaaatacgagtcgcctccgggcaccacggttaccggtgcattcgctgctgttttcgtcatgccccccatctcgccacacaggttggacaatgacctgccggcatcacgattttgccggtgccgtcaagatagtggtattcggctgggattgcgatggttgctgcaccgaataccgcattggctattcggcttgccgccgcgtaaagaggcgtctcgtctcctcacaccagagactgaggcggacgcgccaagcggaaccgaagcgcacgccagacattccggcctcataacgacggacatgctggaggcaacggctgacgaacaccagtagcatgccgataccgatttccgccgccacaatcagcacggcgcccgtaacgccgtctttccatgggatgacggccatcgtgctgccgcccagccacaacgccacccgttccatcaccagcgtgccccatgacgatatccacgcgaatacgccggccagccatggcgtgcaccatgcgcacgtcagtgccatcaatcccgccatcgtggccaatcccacgaacggtgacaccagcaggttcgccggcacggacagcaacggcaattccggttccatcaacacctgaatcggcagggtgaacaattgcgcggccacggtcatcgccatcatttcggcgatgctgtgcggcatcgcgcgctcaaagacaccggccagccgccccgcaaacagcacgatacccagtacggcggccgaagacaaggcgaatccgtagctggccgacatatccgggttcaccgccaatacaccgattatcgtccagcacagggcgctcaacgcttgcgtacgccgtcccatcgcatacgccaacgcacctatcaatcccatgatgaacgcgcgggtgaccgaatcactggggaacatcgccaatgccagcagcgcatatactccagagaccagcaacgccgtcagccgccgatcaagcagcatccacatgcataaccgacgcatcagtcctgccaccagtacgaagtggccgccggatacggccatgaggtgcatgatgccggaccggcggaactgattttccaacgtttgcgcatacgtgctgttgaccggcatcggaccggcatcgccgccgatataatcctggccaagcacacccatcgtcaatcccggcaccaacacacgcccctgatcggacaattgtccggtcacggtgaaaaacgcctcctgcatatgtgcgatcgcggcgagatgccacggcggagcccgcacctgcgctaccggctgttttccttccaagagcagccatagcggtatgcgtccatatcgcgcttgctgcaatacgcccgtcaacagatagaccgcgcctcgacgcaactgcccacaatacgattcatcggcgtatacgcgcacggcgaccgtggaacgtacgtccgcgccatccacagtgatgccgctcagccgtatgtccgtctgacaatcgtatgtgcgttggtccgaagcgatcacgggcgtcgtcaccgtggccatgacttcgtggtatgaactggattggcgagcttgtgcggaggcaggatcatgccaggcaatggtgtccgacgcgattgccgtcatactgccgatgcacgccaccgcgacgcatacggtcaatgttcccgtccacctgatccgcaggcggaaagacaccacgatcatcgccgccacggcagcacatgacgccactgttataggcaatattcgtgtgacaggccattccatgccgattatggtggcgtcaatgccagctccggcatcggcctttgcctgaccggtgccgagtccatcagacatcctccatgcgaataatgcgtgcgctcccagactcgccgcccacatcactatggcgatcggcagcatcctccaatcgcggctcccctgctcgcgcagtatccgatccctgctcatccgaccgtcacctgccctcgcatggtctccagcgtcttggagccgatgcctttgacatccagcagctgatcgactgatgcatacccgccaatcgccgtgcgatgatcaatgatccgctgagcggtaaccggcccaatacctttgatggattgcaattcctcagcggtggccgtgttgaggttgatgagaccatgcgtggaagcgccggcatcgctgccgtccgtctgcatgtgcggagattgcgtggtatccgattcggggttcgctgtggcatcggaatgctccgactgctgcggatccgtgcgtttctcgtctgtggtgttctgcgatggcatcgtctgatctccagcggagccgcccgtggtctgcatggcggtcggttgagacagcatggccatattcatcgactgctggaccagcaatgccaagctgatgccaagggcgacgatcagcagcaatatcacggccaaggcatgcccaatggtgaacgacaatcgcggctgatcccgggtgagtctggctgattctccgacggcatcggcggaacgtacgccaatcagatccgataacgcacgtttgtcacgggtcgcctgccgcaggccgctctgcgccctttggggcgggtggccggccggacgaatccgtgcatggccgggaggcggcggaggcgtcgtgggccgttccactcgcggttgggacatggcttcgctctgcctgctgaatgcgcgcaaacggttggcggcatggtctgcgcgatggttatgagaaacgcccatgcatccacgctgatggattcatgggcgtttgtccagctgaaacggggtatgtggttctagcttatgaagttatccacaattgaggtggggcggttgacgctcccctcagtctcgctacgcgagcggctcccctcaaagaggggagcctaacccgcaacaagtcactccgcgggaacgatggagacgatcttcggggccttgacgatcaccttgcgcggctccttgccgccgagacggtcggcgacggcggccagcgcctgccgttcgaggtcggccgggtcgatgtcgaccggcacttcgagcttggcgcgcaccttgcccttgatctgcaccacggcggtcacggtatcgtggcccacgtaacgctcgtcggccaccggccacggctcggcggacagggactcggggtggcccagcttgctccacatctcctcgcagatgtgcggggcgatcggggcgagcatcaggaccaacggctccactgcggcacgcggcacggccttcaggccggtcagatggttgttgagcacgatgagcttggcgatggcggtgttcggacgcatgccttccatttccgcggtcacttcggcgatcgtgttgttgagcagtttcagggtcttttcatcgggcgcgtcctcggtcacgtgggcctggccggtggtctcgtccaccacgttgcgccacagacgctgcaggaagcgcatgccgccgaccacgttgcgggtgttccacgggcgggattcgtccagcggacccatgctcatctcgtacaggcggaaggtgtcggcaccgtagttctcgtacatgtagtccggggtcacgatgttcttgagggacttgcccatcttgccgaactcgcgattggcatgttcgccgttccaggtgaacgtcggctcgccggaggcgtcggccgggccttccacgacctcgtcggccggcacgtactggccgcggtcgtcggtgtaggcgtaggcctggatcatgccctggttgaacagcttgtggaacggctcggccgaatccacatagcccagatcgaagagcaccttgtgccagaaacgggagtagagcaggtggagcacggcgtgttcgacgccgccgatgtacaggtccacaccgccttcatcacccgagtacttgttgtggttcgggcccatccagtagtcgaactcgtccttctccaccatgtgcttggtgtcggtcgggtcgatgtaacgcatgtagtaccagcaggagccggcccagttcggcatggtgttggtgtcgcggtagtaggtcttcttgccgtcgcccaagtcgagctcgaccttgacccagtcctcgttgcggctcaacggtgcctcgggattggactcggcgtccatcggatcgaaggtgcgcggctcgtagtcgggcacgtcgggcaggttgattggcaatgcggaatccggcagcaggtgcggggtgccgtcttcgccgtaaacgatcgggaagggctcgccccagtagcgctggcgggagaacagccagtcgcgcagacggtagcttacggtgcccttgccgacgccggcggattcgagccaggcgttgaccttggcgatggcgtcgtccacgcgcaagccgtcgagcgacagcgcgtcgcccttagcgtacgtggattcgacgtgggaattgatcacgatgccgtcatgggagacgaacggcgccttgccttcgtagttggccaagtcatcgccggattccggcagcggttcaacggtgtagatgaccggcagaccgaacttcacggcaaagtcgtaatcgcgctggtcgccaccaggcacggccatgatggcgccggtgccgtagtccatcagcacgtagtcggcggtgaacagcgggagcttcgcgccagtgattgggttggtggcgtacaggccggtgaacagacctgtcttctcaccgccttcgtccacgcggtccttggcggtcttggcttcggcggcgagcctgtaggccttcaccgcctcgaccgggttgacatagccgcccttccagtcttcgggtacatcggccggccattcggcgggcacgttctccagcaggtgatgttccggggaaacaacggcgaacgtggtgccgaacagcgtgtcgggacgggtggtgtagatttccatgtccttgtcaccgtcggcagtggccacggtgaagtgcacggaggcaccatgggattcaccgatccagttgcgctgcatgagcttgaccttctcaggccagttgatgccgtcaaggtcggcgatgaggcggtggccgtacttggtgatgcgcatggaccactggcgtagctcacgctggaagaccgggaagttgccacgctcggacttgccttcggcggtgacctcctcgttggccagcacggtgcccagacccgggcaccagttgaccggggacttggagatgtaggccaggcggaagtcgttcaagatatcctgctgctcggcggcagtgaggtcggaccactgcttgccgtcggactcgtgacccggaatggccttttcgccggattcgaacttggccacgagctcggcgatcgggcgtgcggagcccttggagccggacgggttggtggcgtcctcgtcgtaccaggaatcgtagatgcgcgagaagatccattgggtccaacgcacgtagccggggtcgatggtggcgaacgtgcggcggttgtcgaagctcaggcccatgcggtgcagctggcggctcatgttggcgatgttcgcctcggtggtcacgcgaggatgctggccggtctggactgcgtactgttccgcgggcaggccgaaggcgtcatagcccatggcgtgcaggacgttctcgcccttcatgcggtggtagcggctcgtcacgtcggaggccagataacccagcgggtggcccacatgcagacccttgccggaggggtacgggaacatgtccatggcaaagtaggcggcgcggccttcggcgttgcggcccttgccgtccttcaaatcgccgttgacgttggccgcccagaaggtgccttgctcatcccagatcttctgccacttgttttcgatgtcctgcgccagtgcggcgttgtagcggaagttgggctcttcggtttgcgtgctcttctcgttgtcactcataaatcagcaaggtagcctcgcaactggacacgtcgtcaatcgttattcagcatccgagacgatggctttggggtcaccgttcagcgaaaccatgagctttgtttggcttgtgaacgtatccttggcggccgtccagctgccatcctcaaccatgtcttccaatgcttccgcgattttctgcgccaattggctgatgccttgactcacggcgatgccataactgacctcgcccttgtccgcaatcacgtccatatactggggcccgttggccgcttgaagaccggaaagcaccgccatatcggaggctatggcatccgccgaccctacttgcacagccgtgacgcactgcgcataactgctacgctcctgaatccgagcctgcgggtggttgccgcggaagatgccgactgtctcgtcacctttcactgcgcacaccgtgccgtcgcctacgtcgcccaccgaacctgcgtcattggtgaatcggccacgctcatccgacctgaccagcaaaccgacgctggtcgtgaggtatggtccggcaaaatcaacgatcgcgctggacccatcggtgataggccaagaggcgacgaccatgtcgacctgtccattgtccagcatggagcgccggttttcggggcgaacctgcttgaagacgatctgcttgttcgcatagccgagtttggcggccacgtatttggcgatggtgatgtcgaagccctggtatgtgccgtcatgccatgctcccaccgatggttcgtcggctgcgaccccaatggcgatggtgggtccctccggcgctccggagacggtggtgacttgaatttggccgcaaccggccagaccggacaatggcaatatcatgccaaaggccgcggcgaatcctgccatcagtcgggagcgaaatccgcgccgcatcgggcggcgagcgcggagcacgctacggctggcgaacgatgaccaatggtgcataaccgtcaaacgccttacttgaacatgcgcgaacgtgtgaggaaccaggcgaccacaccggaaagcaccatggagatcacgatgatgagcaggaagccccaaggcttgtcggtgaacggcatgcccatcatgccgccgtcgaagttcatgccgtacatcgagaaaatcagcgtcgggatggacagggtgatggagatgatggtgaagatgcgcatcacgttgttcaggttgttggacacgatcgaggcgaaggcgtcggtcatgttcgcaagaacgccgctgtagatgttggccatctcgatggcctgcttgttttcggtgatgacgtcgtcgagcagatcctcatcgtccgggtattgtttgatgcgttgcagggtggtgagcttctccatcacgatttcgttcgatttcagcgatgtggtgaaatacaccaaggtcttgctcagctccatgagcatcacgatctcgcggttctgcatggagtggcgcagcttcagttcaagcttgtcgctttcgcggtcgatgatgcgcaggtaacgcaggtacatcgtggcgttgcggtacaggatctgcaggatgaagcgcgaacgcatgaaggtgttgaagcctcggatcgtgccttccatgaatgggtggagcacgggcgtgtcctgcatgcagacggtgatgatgaggttttcggtgacgatgatcgacagcgggatggtctcgtaccagtcgcgtccgccacgctcctccacggtggggatgtcgacgatgatcatcgtgtaatcgtcttcgacgtccacacgtgaacgttcctcgtcatccaaaggggcgcgcaggtcggccaggtcgatgccggtctgcgaggcgacagtggcgagctccacatcagtgggttcgctcaaacataaccaggagccgttttccggtttctcgatctgctccacctggccattgattgagctgaagattctcagcatgtcgcctcacccgccttccgcgctttcctactgttctatcgctgtacggttccaaaccgagattagtctagacccaccgttcgaatttgcgagcggggtttcgcatagcgaccgtcaccagacgattggctgccaactcggcatgtgcggtcctcgcagatcggtcggcccgttctcccagtcggcgctgtcggcgatggcgggagccttgttgtattcctccaactcccacaggggctgttcggtgggggtgccgttgacgctgtggcgcactttgagccggcaccagcaggcgttgcgcatgccgccgagtgcgttcatgccgtccgggtcgagttcgagcaggttggagatggtggcggtaatccatgagccatgggtgacgagcatcagcgtggtgggcatgctgtctgaataggcggagtcgatgaccagtgcgcgcacggcatcggcacctcgctggcccacggcggcacggctttccacaccatgcttggtttcgcccccggtgtgctgtttccaagaggcgtagtcgtcggctgccacggctttgatttcggcgcgggtcatgccttcccactcgccgaagctgcgttcacgcagtcgttggtcacaggtgaccggcaatcccaaaatatcggcgaaggcgtgtgcggtctgttgggcacggaacaggtcggaggtcatcaccaccatgcgccggccggcggcgggggcctcctcgaactgtcgcgtatcagtgcgttcggcggcgtcaggaccgggctgggcgatggcttcgggatgctcggcaagccggttcaccttggcccagtagtaccgtgaagcgagcgcgaatccggtctggtcgacctgccattggcccacgatgtcgagcggcacatcgatctggccttgcaagcgatgttcgagattgtattgcgtacggccatgacgcagcatcatcacttcatcgatcatcggttttcgccacctcgttctcttgcggtttgccatactcatctcagcacaacccctagaatggcggcatggagatttctgaatcgacctgggcgttcatcgccaaacaccgccgtgaagatgtgcgtgatgtggccttgcacgccaaacatgatggcgacgtggatgtgccgttcgcgctggagcagattgccggctggcagcgcgcttcgctcaagctacctgactgggcgtcccatgatgggctgattttcccgccgcaagtcccaatggaacaatgttccagccagttcacggctcaatacaaagcccggttagcacagcgattgttagacggggaagcagtcgacgacgccgacgattccccgacatccctagtcgatctgaccggcggtttcggcgtcgacttttcttacatgtcccgagtgttcaatcgtgccatatatgtggaacaacaatccactttatgtgatatcgctcgccataatttcccgatactcggccttggccacgccgaaatcatcaatgatgattcaacagcagtgcttgatacgcttggccgagcctccatgatcttcctcgatccggcccgccgtgacgatcatggctcgcgtacctacgcgattgccgattgcacgccggatgtgctgaccctgaaggatacgctgctggccaaggcaccgacggtcatggtcaagctctcccccatgctcgactggcataagaccgtcgccgatttcgccggcgcggtgcatgaggtgcatatcgtctccaccgggaatgaatgcaaggaattgttgttggtgttggggcgcggccgttgcgcctcaccgctcgtggtatgcgtcaatgacgggcaggtgctgtcgtacaaggccggcgataacagcgacaatcacacccctatcagcgattctgccttggttgcacgcaatacctgtaataccgaggatttcccggctgaggaaagcgcgaacggcttcgattcctcgcattggaagtacctttacgaacccaacgcctcaatcatgaaggccgggtgctttgatgttctcgaacagcgcttcgtcgtgcatcacatcagcccgaatagccacctgttcgtggcggccgaacctattgccgatttcccaggcagatcattcgtcatcgaatccatcgccaccatgaacaagagagaactgaagcagctattggccgatctcacgcacgccaacatcgccgtacgcaatttccccctaaccgtggcccagctacgcaaaaaactcaaactcaaggacggcggcaacacctacctcttcgccaccaccgacctcaaaggccatcacctagtactgcgcactgaaaagcgaaaaagtggctccctctgacgaggaagccaccaatacgtcagctaatcagtccttggcgatggtcttgccggcggtcggaccggaggcaaggttctggatctcggtgacttcgagaaccggaatcacggccggcttcttggtgcccttttcctcggcgatcttgacctgctcgttgtagatgtcgtcgtcaacgtgcagcaccacgttgccgcggaagcggtagccctgcttcttctcgaggttggcgaaggcgatgaccagcggagagccgttcttgaggttctcgtagtgctggccggcggtgcgctcgtggtaggcgatgtgcgtgtcgtccagcacgaacagggacatcttcgggccgaggtccagttcgccgtccttggagacggtggtgatccaaccgaggttgttcttgatgaattccttgatttccggagtaatgactgccatgtcgaatcctttcatgattgctatggacaacgtatttttactctttccagagtaccggtttcgagcgcgactagcccggatgttcgctgtgagtaacctcaccttcgcacagctttcatccggttcttacctgcttggcgatgccgcgccccggccgcgcaccagccacacacctgtcacacacccgacgcccatcgaccggtcgattttggccggtagttcccgtaatctgtgagccgagagagccacaagttttcctaactgtcctgaggtgcaccatgggtttggtcgaacgtttcagcaagctgcgcagccgctggtcccgcagctttcccccgaatctcgcccgactcatgttgctgggctgcgccgcattatggggtggcagttatctgctcgccaaattcgccatggaggcgattccgccccaatggctgatgggtctgcgcatgataggcgcctgcctgtgcatgctggccttgttccataagcacatcgtgccgtatctgacgccgaagatcattgtgccggcgctcgtggtgggtctgacctactggggcacgatggtcacccagaccatcggcctgcagaccattgaaccgggccgcagcgcgttcctgacggccgcctactgcgtactcaccccgttcgccacgtggatcatttcggaaacccgcccgaaggccatcaatctggtcgccggcgtgatctgtctgatcggcgtcggcttcgtctcgctgaagccgggcggttcgctgtctctgagcgccggcgactggctgaccatcgcaaccgccgtcatcttctcgttcaatctgacctgccttggtgtctacaccaaacgcttcgaccctatcgccgtcacttttgtgcagttcggcgttgccggcgtattgttcatcatcggcgcgttgttcaccgaacccatgccgaacgccagctggctggcaccctcagtagtggccagcgtgctctatctgttcctcggcgccacgatgagtgcccagatcatgcagaacatcggtctggctcacgtgcctgcctcgcaggcgtcaatcatcatgtgtacggaaagtctgttcgccgtcacgttctccgcgctgttctggggcgagacaatcatgtggacttcgctggtgggtttcgctttgattttcgccgccgtactgatgtcggtgatcagaccgaccgggcagtcgctgcatcgtaattgacgatgtcccgcggcctgcggcgacgcgaaacgcacgtgtgtgcgccgcagggcgtgtcggacctgtacgaaggccgattttgaaggtctcgtgtaggcctcgccccgcttccatcgagtctcaggcaacctgtcagcccgacaccctacggtcgtgcattgtgaagaagttttttgaaggaatctccctctcatccatcgtggcgggcacccttgccgccgtcacctcgttcctgctcgcatcgaagatcggcatcggcggttcggtgatcggagcggcggccagttacgtcgtctccgccgtggccaccaagatctaccagaacgtgctcaccgcctccggcgaaaaactccaatcggcctcgtcctccggcagcgggatcacgaaggacgccgagaacggcgatgccgatggcggcaccccccgaacggccggcagccggaccgacgttcgggacgagcccgatacggcgacgggcgtgaccgccgatgatgcttcctccacacgcagaccgcgtgaaatcgtgttcagccgggcgaacggcaggacgtactcggtcgatgagctgcgcaagtcccgcttccgcgcttcgaagcacaccgccatgatcgtcaccttggtgtccggcctgctcgccgtggcggtgacggccggcgtcgtgatgctggccacgcagggacgcggcacggacaatctcgtatcccccaccacgaccacgcccgcgcgcaacgacaccggcacgcgaacgggcacccccgatcagaacaacgctctgccccagacgggcaccggcgatgattcgaagggaaccagcaaggattcgaaaaccgacgccccctccaccgacctcgacgccaacggcacctcgggttcgaccggcgccggcgcctcggattcgaaaaccgacggcaccgccaacggttcgaacggcaccggcacctcaaagaatccgaccaccgaagacccgaccagccaaggcgtcggcggcagccagaccggttcgaacggcaccggcaccggctcgacgcaaaaagatccatcgggatcgacttcaaccagtaccggcaccagcggcaccagcggatcgccggccaccggcccagacgcgggcctgtctcgttaagtgtgtaactggcgttttcattgttgtgttccctcgcttggccagcggtcggcgaaggtgatggcaaaggcgttgagcgcgggcttccagcgcgcgctccatcgtatccgtcccttgccggtggggtccagcgagcggacggtcaggtacatgcacttgagcgcggcctgctcgtcggggaagtggccgcgggcgcggatggagcgcttgaatctcgcgttgagcgattcgatggcgttggtcgtgcagatcacgcgccggatctccacgtcatagtccaggaacggtatgaaccgttcccacgcgtccatccacagcctgcggatcgcgggatatctcgcctcccacttgtccagcatcgcgtcgcgggccgccgccgcggcggcgggcggcgcccagatgcccagcacgtcgcggtcgccctccagatccacgccaacggccacgtagaacgcgcggttggcgacctgcccgtcgcgcaccttgacgacggtcgcgtcgatgaacacggccgcgtacacacgatccagggaacgcgagcaccattcgtccttctcggccacgacccgctcggtgatgcgactgacggtctccctggacacgtccgccccgtagatctcctggaagtgggcgctgatctcgccggtggtcaggcccctggcatacagggacagcaccacctcgcccaccccgggcagccgccgctgccgtttcctgacgacgaccggctcgaacgagccatcgcggtctcgcggcacctcgatcccgaccggacctaccgaatcggtgaccacggtcttggcggtggtgccgttgcgcgtgttcgcggccctgccgtccttggatttcttgtgcttggcgcggcccaggtgctcggtcatctcctcgtccagggccgtctccagcacgcttttggtgaactgtttgagcagtccgtcgggccctgtcaggtccagtcctttttccttggccatgcgcacgaatgtgagcgctgcctcccgctcggcgttgcgtttttccgcgtccggcttcttcgtcggtgtcatgtttcccattgtcccagcacacatcgtccaccagcctttccgaccggccacacgaccggccagttaaggccagttacacacttcgagagacagtcccacgtataccggttctttgtttatgtaagggaatgattgatggttcggtttgcctgtttgtataatgcgcttatttatcttggtaccggatgtttttcggtctactatatggtggcctatcatgatgtgggcctgtcggtgctgctgatctccatcgtcaatgtggtgttcgacgtcagcgaatcggccagcgagctgcccacgtccgtgctgttcgaccggtggtcccgggaacggacgctgatcatcggcgtgttgtgccgcgtcgcgggattcatattgatgctgttctggtccgcgaacttcgccgtgctgtgcctggccaacgtgctggccggcatcggggccgcggtcgaaagcggcgcggcgtcctcgctgtacatcgaatacgcccgcaagcacgatccctcgctgggtatgaagaccttggtgtcaagactgtcggcgatgatcgctgtgtgcacgatatgcggcggtgcggtcggtgccgtgctgttcctgcttgactcccagctgatctggctgggcgcgacggtgttctacgtattggcgatcatcccgcttctcggtctgatgagggccgggtcgcgcaccaaggccgcagcgacggatgggagcgggacgacggaacggcaggccgaggcgtccgtcgaatccgatggatccgccgagccgggcgagtccgggacctcgctgacggtgttggatcatgtcaggcagaccgtcgcggccgcggccgtgctgctgcggaagccggagatatggaatatggtggtgttcaatctgggtacgttgtcggtgctgacgttctggcagctgctgctgatgggccaccagaccggggtctggtggcagttcgccggcctagtgttcactaatatcgcgcagatcgtcggcagtcgtctgggtatgctgcggctgcatccacgttccggcgacattgcgatcctcgtgctcatcgtgtcggcggtggtgcttgcggccacgccgataccggcggtgaggatcctggcgttcttcgtgttctcctgcgcgcagatgtacgtggcgaacacgatctccagcagcttgcacgagagcattgacgattcgatccgcgcgaccgcgttctccgtgggatcgctcgtattgatggccttcaccgcggtcgtcaccccgctgtgcggctacatcgccgacacgttctcgatttcctggggtacactgacgacgatccccctgctggtggccctcctcatcgccggacttgcgcgaaagcctgaatccgacaaacgggtaaaagtcgatatttcgttggattgagacgtcaagggcttgcggacacgatgtccgcaagcccttgacgtctatatgtcattcattcatggttggaatgcgctcctcctacgcgtgcggttgaatggttagtccatcgctatcatcggagggtgtcagggccgaagatgaaaccgtctgttccgggtgcgtgatccaggtggaatggattggcaacggtgtacgacttgtcgccgggtttcacgtcgtccgtgtcgaattcgttggaatccttgtcgagcagtgggccgtccagcgaggcgggacagtacacggtgacgtgccagttgccgtcgtccatggggatgagcacggtgtagtgccttggagaccgtctgctgcggcatcccttatggatgattccttgataaaggagtttcggggggcgggtaacaaaaacccggaaccgaagttccgggtttttgtctggctcctgcggctgggcttgaaccagcgaccgtccgattaacagtcggatgctctgccaatagacaacgggcaattcgactgccatgtcaggtatggtaatctcgaaccagccagaagatcgataagccaaattacctgcgactgaagtgaggacggaatcatgcgtagcgagttctctggtctgttgtattgcgcgggtgcattaatcgcagtgacctcttgggctcttttcatgttctcgaaagaagtccatcggaaaggccgaacagtatccatcctgagattgcccgtcatttggatactgttcctcgtgagttcggcgccggctctcgcatcatatccggtttttgaaatatactcaggatctatggatccagatgtcctcgatttctacagtcagccgttcatacggctactgccggcggcgacctgcatagtgaatctgtgcgtatctacatgttgctccatggctcttgtcagcaagcgcagaaaaaccaaacatcgaaacatctgaatcacagtgttcgagaggagatgccatggaaaaacagctgcttctgctggacttggtgccgctgacaatcggattggtcctgatctcagtcgcgatcgg

SEQ ID NO: 3103 - DNA, 21584 bp, Unknown
  R215_18m  MAG No. k141_7934
ctggccgacgccggctaccgtgtgattccgatcgtgcgccgtctgctcgccgactcgctcaccccggtcggcttctacgagcgtctcgccggcggccgatccggcaccttcatcctcgaatcggcggaatacggcggcacgtggagccgttacagcttcatcggcgtcaactcgatggcccagctgcgctccaacaacggtcaggccgactggctgggcaaggtcccggttggtgtgccagtcaccggtgacgtggtcgaagtcgctcacgccacgttgaagactctgaaggccccgcatgtggaaggcctgccgaacctgaccagcggtctggtcggcacggtcggctgggatgccatccgccactgggaaccgaccctgcgcgccgaagctccggacgagaccggccagcctgagaccgtgctcgccctggccaccgatatcgccgtggtcgaccacgtatccggttcggtgtggctcatcgccaacgcggtgaacgtggatgataaatccacccgcgccgacgtcgcctacaacgaggccgtcgctcgactcgaccagatgcagcacgatgccgccaccccggctccgggcgagtcccgcgtcaacatcttggacgaaacggtcgcccagcctgagctgcgcttccgcaccgagaaaagccactacgagcaggccgtcgaacgcgccaagcagcacatcgtcgacggcgacgtgttccaggtggtcatctcccagcgtctcgacatcgattcgcctgccgacccgttcgacgtgtaccgtgtgttgcgcacgctgaacccgagcccgtacatgtatttcatggcgttgaccgatgctcagggccgcgacttcaacgtgatcggctccagcccggaaaccctcatcaaggtggacaacggccacgcgatgaccttcccgattgccggatcccgccctcgcggcgccacccctgaggaagacgaaaaattcgccaaggaattgcttgccgatccgaaggaacgcagcgagcacatcatgctcgtcgacctgtcccgcaacgacctgagcaaggtgtgcgtgccgcagtccgtggaagtcgtgcagctcatggacatcaagcgtttcagccacatcatgcacatctgctcgacggtcaccggcaaggtcgacccctcgctgaccgcattcgatgtgttcaagtccgcgttcccggccggcacgctttccggcgcgccaaagccgcgcgcagtcgaaatcatcgacgagttggaaccggccgaccgcggcatctacggcggcaccgtcggctacttcgatctctctggcaacatggacatggccatcgccatccgcaccgcgttcctgcgcgaccatgaggcgagcgtgcaggccggtgccggcattgtgctcgactccgtgcccgctaccgaatggcaggagacgcgcaacaaggccgaggccagcgtcgaatccatccagatcgccgcccagctgcgcgaactgtaacgttcaacgcatagcgatgcccctgctgacaactgctgtcagcaggggcataacaatatgcgtatcagtgggtttcgcccatgatgtcggtggcgtcggttccggtgctcacagcggcctcgatggcggcttcgatgccgcgcgccatggtcgcgatttccatggtcggcgtgccgttcggcttgcccacgccctgcgcggtcgcatacggcacatgaatgaagccgcccttgacgccggggaatttgcggtcaatcagatacaacacgttatacatgatgctgttgcacacatacgtgcctgccgtatacgacatgaatgcgggaatcccgtggtcattgatgttcctgaccatggccttgaccggcaacgtggcgaaatacgcggtgtcgccgtcctcacgcaacggcgtatcgaacggctgctcgccatcattatcgggaatacgcgcctcggccaaattaatggccactttctccacggtcagagccgaacggccaccagcctgaccaatgcacagcacatagtcaggctgctcgcgcaccatggcttcctcaaccacggtcgcactgcgcgtgaacaccgtcggaatctccagtttcaccactgtcgcaccggcgatttcatccggcaacagcttgactgcctcgaatgcggggttaaccggctcgccgccgaacggatcgaatccggtcaccagaatcttgctcatcattagctccttatttcacggattgttgtggtatttggacaacgaggttattgcgcgatcagcatatagacgatctgcaccacaatcatcaccaatgcgggcagcacctgcttcttaatcacgcccatgcggtccttcatatcgagcatcgcgacaggcacgatgttgaagttggcggccatcggcgtgcacagcgtgccgcagtagccacaggtcagcgccagaatgccaatcaccgtcgggtccgcaccgtaggcgagcacgaatggcgcgccaatgcccacggtcattacggtaatcgcggcgaaggcattgcccatgatcatcgtgaacagcatcatgcccacaccgaatacgatgatgcccagcgtgacgttgcccttcggaataatgccgccgaccagcgtggcgatcacgtcgccgacacctgcggctgtgaaaatcgcgccgagactggccagcagcatcggcagcatgcagagcgcacccatggcagacaacaggcgttccgaatcgttgaggaatacgaccggcttgttgtcatgcgagaacgcgaacagaatcacggcggcaatcatcacaccgatgcagcagccggtcagggcgctgacgctgggaatcagggcgccgataatggcgaacacgcccagacacagggcgggaatgaagatgcgcatgccgatgtgctggaagttcgtggccacttcggcggtgctgggagcgctcgaatcggatgccgagcccttacgcacttggcggaagatggcgggaatgaccatgatgataatgagcacgccgtccgtaatggccggaatccaacggccgaatgcgatgacgataccgagcgccgtccagaacacgaaagtgccgtagcgggccttgttggttttatcgagtaggttgcgtacgcccgcatacacggacatgaaacccatgaaaatatagaagaactcgaggattttcgtgccaacggtcacgctggggtccatgaagaacgacatatcaggcctccttgccggtggtggtagcggtggcggcctgagcggcggcttcggcaccgtagtacttcttgcgcagtcgtgtgtccttgatgatgtaatagacggcggtgaccgccacggcaatcaccgcgacaggaatctcgataatggccatgcgcaacagttcgacgtcataacccagcggcttcaacgtggactgtacgagcagcgcaccggccgtacccacgaacagcacctggccaaagaaccatgcgacgttctccatgccggaagccatgcccttgagctcttccacatactcgtcgttcggctcgtgaccggacgctgcaatcgcacccaccgccatcggcatgatgaccggacgcacgaacccggccacgccaccaaaactcacgttgaacgcggcgaacacgagacgcatcacaccatacagggcgatcaccataccgggcgtcgcattcttcactttgccgatcagctgcgcagctgcggttttcagaccgttgcgctccaatgtgccggtgaccagcaacacgatgatgaaaaccgccatgctgcggttcgagacgaacgacgtacccaacgtggtcaggaagccgtcgacgccaatgccgccgaccagcgcagtcaccacagccgccacgataatgatcagaatcgcatcaagtttgagggcgaaacccacaatcacgatcacgattcccaataacacgagataatttggttccatgcgggaaatccttcctatactgcacacgcattgcgccgcaagcgtgcccggatatggatagtgtacgacggaaatcacgattcaactgtcttatcgcgcacattgcaggtattacatgagcctacgggcatataagcgtatggacgcatgagcgtcggctgagcccggtcggcatggtgttcgctatgatggacagtcggactttggtaagagacagtattcgtaacaggcaagtaggttattcatggctattgaggtgcagggacttgaaattcagatcggcgcgcgcacgctgcttcaccccaccaacttccatgtggccaagggagacaagatcggtctggtgggccgcaacggtgccggcaagacaacgctgacccgcgtgatcaccggcgacatgctgcccaccgccggcaaggtgcgcgtctccggcaagctcggctacctgccgcaagacacgcacgcctccgatcccacgcagaccgcgctcgaccgcatgatgagcgcgcgtgacatcgccaccatcatcagccgcattcgcaaggccgaaaaggatatgaccgacccggatccggacgtgatgagcaaggccatgacccggtacgacaaggccatgcaggacttcgacaaggctggcggctacgcggcccagtccgaggcgatttccatggccgcctcgctcggcctgccgcaggaggtcatggagcagcagctcggcacgctctccggtggccagcgccgccgcatcgagctggcgcgcatcctgttctccaacgccgacacccttattctcgacgagccgaccaaccacttggatgccgattccatcgaatggctgcgcggctacttgaagaagtacgagggtggcttcctggtcatctcccactccaccgaactgctggacgaagtggtgaacaaggtctggcatctggatgcgcagctcggccagatcgacatgtattcgctcggctggaaggcctacctgcaccagcgcgtggtggacgaggagcgccgccgccgcgaacgcgaagtggccgagaagaaggccgaccgtctcatgaagcaaggcattcggctgcacgccaaggccaccaaggccgtggcagcgcagaacatgatgcgccgtgccgaaaagctgctggaaaacacctccgaggcgcagaaggccgagaaggtggcggacatccgtttccccgagcccgcgccctgcggccgcacgccgatcatggccaaggacatctccaaggcctacggttccaacatcgtgttcgccggcgtgaacctggccatcgacaagggctcgcgtgtggtgatcctcggctacaacggtgccggcaagaccaccacgctgcgcctgctggcccacatcgaggagccggacaccggttccgtggaatacggtcacggctgcaagatcggctacttcgcgcaggagcacgacaccttggatctgaacgccaccgtgttggagaacctgcagcatgtggcgcccgagctcgacaacacgcaggcccgttcgattctcggctcgttcctgttctccggcgatgacgcgatgaaaccggcccatgtgctttccggcggtgagaagacccgtctggccttggccacgctggtcacctcgcgggccaatgtgctgctgctcgacgagcccaccaacaacctcgatcccgcctcccgtgaggagattctgaaggccattgccaagtatgagggcgccatcgtgctcgtcacccacgatgagggcgccgtcgaggcgctcaaccccgagcgcgtgctcctcatgcccgacggcgacgaagacctctggaatgattcgtacctcgaactcgtagccgaagaatagtcctactgtggccccctaccgggagctgtcagcaaagaacgggttaaccctaggctcccctcgctgaggggagtctcgcaagcatgcaaaggaatcaaccatgccaaccacaacaggccagaagatcgccatcgtcaccggcagcgcgctgggtttgggctacgagctcgccagccaactcatcgccaagggctggctggtggccggcatcgacttcaacgccgaacgtcaggccgagctgagcgcgcagtggccagccgaatcctaccgcgccttcgtaggcgacatcaccgacgaagcatttgtcaaggaatccgtggcgagcatcgccgcgctcggccacatcgacctgctcatcaacaacgccggccagccttcgttcaaggtgcccaccgcctatgaagccgctgacattgacaaatgcctcaaggggctcaaaggcatgattctgtggacggtggaaaccctcaaggcctgtggagagcgcgacgtgaaaatcgcccagatcatgagcaccgccgccacgcgcggcaacgcgaacgaaagcgtgtactgcgccgccaagtggggcgagaagggctataccaagagtctgcaggccgcatacaagggcaccagcgtcaaggtggtcgccgtctatccgggcggcatcgacaccgccttctaccgtgatagccacgattacgtgtccgaagccaagcagcacaccttcatgcagcccggtccgctggccgaagtcatcctcttcaacctgatcaacgaggccaacctcaccgtcaccgacatcgagatcaaccgcaacagctgagctggcaggttatacacatatccaccgattcggccgagctggttgcgcgcagaagttggttatgccatcgtgagttgtatccgtgaataacgcggttcacggatacaaccattggggggatggcatggagtcctatgcatacaacacgttcttcacacttgatgaggcgcgagacctcgcccagaaaacactggaacaatgccgtgccagatcgatgcgcacttcacaggagctttgcttcagccatggcaccaggctacagcttgctggtatgacggccacgctgaattacaagcccaactatgacctcaacaaactgcacgttacggtgtccggggctgaaagattgtcgaatctcaccgaaacgcaatgccattattggggtcatggcattgaccagacgatgattgatgatcttatcgccgtggtttcagtggaacaggcgctgtgtcagatcgcacagttcgtcgatgtggaaagtatggtcattgccttggattgggccacctgtcgtaatgagcatttgaaacagacaacgaaagacaagatatcgttgttcctcgccgatataggtagattcccaggtatcagattatttcgcaaagcgctctcgttgtgcagagagaacaccgattcgccgcaggaaagcatccttcgccttgaatcggtaaaacgtggattacccgaattggaggtgaatgctccgatatacctcccgttgcagaacaaagaggtggttgtggacatggtgtatccgaatgatcatgtgattctggaatacgacggacggtaccactatgaccgaaaccgatgggaaggagatatcgagaaaaggaacaacctctccttcgcgggctataagacttttcccgccacaagaagaacgttcgctaccacgcagaatctggatgaatacttcagaatcgttggaagtgcaattgcggaataccgcaataccgggtcattttcacaatgagatatgaccggacgcattcattaggtcgattcttcattcattaggtcggtgagctctgacagtcaccactggaatggtgccattccaacaccgacaatcgcagcctcatgacctaatgaatgaagaatcgacctaatgaatgattggaagcgttccgcgcaacgttatggcacccgcaagaagccggaacccggaatatgtctgttatcgtgggagccaagcaacaggtgaaggattgagtatgcacatcggtgacgatgagtttgaacgggccattgaacaggtgttggatgatttgcctgaacggtttgcgcgggtgctggagaatgtcggcatcgtcgttgcggacgaacccaatgagcgcgaactggccacaatgagcaatccgtgcggtgagctgctcggactgtatgagggcatacccatcacgaagcgaaccacgggctacagcggcgtgatgccggacgtcatcaccctgttcaaggggtcgcatgaacgcgtatgctcaacacgggccgagctgcgccaacagattcgcaaaaccgtgttgcacgagatcggccattatttcggcttcgatgacgagtatctgcactcgcacggctactgaagcgctgctgtttcactagcggggagccgtcataccgccgtatgttgccagatctactgcaagtggtgcaacgcacggatgatggcgcaacggtcctcggtggttccctcgttggcgtacatggtgtgcgtaccaacgcggattgcgcaaggtctcggcgccggtggcctcatccgtggcgacgagcgtgtgcagatcgttggcgtactggaaatgcaggtggctgagcagcccgccctcggcgaacgccttgcgcgaaggcagagggttgatggccagcaaccagcggaacgggctgtcttcggcggccagatcagcggtgcggagcacgaaggtgggggagctttcgagcccgtgctcgatgacatggtcgatggcgtattcgtaagtgtcgaggctggtgtcgtcctcggcgaaccattcgatggcgagcgaggcattgtccgtggagccggattcggcggccgggcttgaagccagggccgcaatccggtgccgatacggttccaagtcaaacgcccgcaatcccatggcggccacgcagccgggggagagggacaggaattcatcggcctcgtaatcctgcacgatatgtccgccgtcgaataccacgtaccggtcggccacgccgttgagccatgcgagtcggtgatgaaacagggcagcatcatcgtgacgcccacggccagcgcggagaccacatgcagccacggcagtcccagggcatcggggtcgagcattcccagcgcggtgagtacggcataggtcacgccgaagttcaacgcggttcgccatcgggcggccgccagcaggggcaacaggaacagcacgaccatgacgatttgcgtggcgagccctacatggaagaacagcatgaggttcgccaccagcagaaggaagagtctcgcgcgcggatcgagcgtccggcgggcaggaagatggagccgaagccgctggtgaacagggtgctcaccagtgtggcgatgcacaccatcacgaagtacagggccgcaaacacgccgatggtgatgaggtcggagacctccagtttgccggatttggcgggcttgttgagctggtcagaggtttcggcggacgtgttcggtgcggtcacgatgttttccgtttcgtatgcattgacaatattcctctcgccaatctaacgatgatttcccgcaaggcaatagtctgtctgtgatttttgcgtgcgaaacaatagagctcccctctttgaaggggagcctgagtgttccatcaaaaccgaatgctcgcccggaactcgccttcggccggttggccgagttccagcctggctcccatcgcctcgcatgccgtactggcgatggacaggccgagccccacgccgggcacggcgctgatacgcgagttctcgccgcgatggaacggttgggtcagctcgttcagatcgtccggcagcatctcatccgtggtgttcgtgacggtcagacggggtccgcttccatcctcatccgatacgacggtcacgtcgatcgacccatcatccgtgttgtgcacgacggcattgcgcagcaggttgccgaccgccagttccagcaacgccgggtcggcggcgatgagaaacatgtccgcgtcgccgccggccttgttcacggttatggtgatgcgacgcttggtggcggcatcgtcgatatccgcaagggagttgccgacgcatccgtacaaatctgtggatgtgcgtgccgttgatgcgggactcatctgtgtcacatcgcccgcctgcttgccgccgatggtcccgctttgaatacgggacaaggtcagcagcgcctgcaccagttgcgcgccgcgccgattggcatccagtgcgcgctgtaccgacggtcgcacatcctcggggaaccgcccctgggccaacggcgcgtccagattggtctccaccgcggcaatcggcgtgcgcagctcgtgcgaggcattggacacgaaccgccgctccgcttcggatgcggcctgaatccggtcgagcatgccgttgatggcgtcaccgagctgcgtgacttcggaggattggccggcagctcgaccgtccgtgcggctgtccgtgctatgatcccaatcctcggtcccgcgtctgcccgcacgccggaactggggcctacggcgagatggcggcccattcacgtcgatgcgcgtatcaagtttggccgggtccaatgccgccgcctgcgcgctgatggaggtcagttgccgggacatgcgcgaggtgaccagccagatgatcagaatgctggtgatcccgaagaacacgaagatgatggccgcgctgatgcgcaatccggtggcgatgttgtcctggttccacacggagacgccatacggggtgttgatggtatacgacccgtccttgccccattccacctgatagtcaccgtcgcccatatcgccgccgacgctggatgttccagtgatatcgttcagacctgtgccgcttccccgggaaaacattcgcgggtcggaatccgggcgtttgccggtgccggaaccgctgtgctggctttcgacctgcatctcagggtttttggcggtgaccgtcgtggcgtacgtgaacatgctgttgaccacaatggtctgcacgagggtcgccgatcccatggcgatgaggaacacgagactgatggccaacgtcagtttggcgcggaatgatttgggccgcagtttgccggcaagcgcctgtatacgacctgatgctttcgccgtgttcgtcgccttcattgcagccggtatccttccccgcgtgtcgagacgatggcctcgcgatcggcgagtttgcgccgtagcgaatagatggtggttttgatcacgtcggtcgggtcggcggcggtcggctcatcccaaaccgcatcgtagagttcgtgcgcggtcacgtatccgccttccgcacgcatgagctccagcaatatgccgtactccttgggtgtgagtttgacgagcgtgcgcccgtggtcgcggaacacgagccggcgtgtggaatcgagggtgatgtcgccgcgcgtgagcacggctgcggtcgcgttgctggtcccgctgcgccgttgcagggcgcggatacgggccagcagttcgggataggcgaacggtttggtcaggtaatcgtcggcccctaggtccagcccgctcacgcggtcgctgacctcggcggcggccgtcagcatgattacggccacgggaatgcggttcgcggcgacggtggccatcaccgcgtcaccggacaataccggcagatcacggtcgagcagcatgatgtccacgttcgtgccggcaaggatcttcaacgcttcgacgccggtggttgccagactggtcgcgtacccctcgtagcgcagcgcgtcgtccaacgcggcggccagttcgcggtcgtcctcgacgatcagaatccgcatcatgtccccttccgagccttcccgaaccaatggcatcacccaacattttcccgattctacggtaaggcgaaagtaatccgtccgcttaccgacgctccacggtgagggcgattggatggaagtcgtcacaatcgactcacggaatggagacggtaatgtccactactcatacgcgcctggtacggcgaatcgcaatgcttacgtccgcactctcgctggcttcgatgctgggcgcctgctcgtcaccgctggcggcagtcggaacaggctcaggtgccgacgatcggtccgatgcgacgaccaccaccgacgccacggcgaagcgattcgccgcctgcctgaccggcaaaggattcgacgcgcgtacggctgctggcgtgtcgtccggctccggctcgggcaaacaagccccgaccaaaaacgcggtcgcactgcgcatgatcggcatcgacggcaagccggtcgcctcccaaggcaacagcctcagcgcatccgacgacggcccgcaactctacccgaacgctgcctacacgtcgatggaagacgacagcacctgggtggtgttcaaggacgccaaggcgctcgccggctcaccctacgaatccaaacagcgggaatacgccgactgcgaggccaagaacaccgacttcacccagcccattccggacatggggccgcaacaccagtattccggggaagacaagcaggcggcgctcgcctacgcccaggccgcgcgtaagaagggcttcgactgggtcaaggacccggacgccgatacgcccacctcaatcacgattcccggcaccgtaagcgaatccgaactgcgccgattcctcaaggaatgcccgaccgatggcgcgaacatctcctatgccttcgccggcaccaccgaggaattcggctatgactacaacaaagtcctctccgaattcacctccggcagcgcgtccaccgaagccgcgccccagcaatgagacggccatccgataacggacaaaggagcaatcatgacacggacggaagcgcgcagattcgggaaacaccgcagaatcgtgacgatgattatcgcggcgatcgccgtgatcggactggccgcggtgtgcgtggcggtgaggccgtggacgttggccgggcacgtcaccgcgaccgggcagactggccgatcgcagcaggtggatgtgtccacgctgcgcacgcaggaggtgaccaagggcatactcaacgccgagacccggctcggcgcgagtctgcaatacgatgacgcctccgatttcgcggccgcttccggcacaatcacccaactgccggtggccggcaaacagatcaacaccggcgaacaggtgtacgagatggacggcgcgcccgtgccgctgttccatggcgaccgcccgttctggcggacgatcggcgatggcgtctccgacggcccggacgtcacgcaactggagcagaacctgcaggaactcggattctacggcggcgaggtcggaccgcatttcaactggctgacccgcgaggcgatccggcaatggcagcgctcgctcggcctgaccggcgacgcggtcaccggcacattcgacccgaatacggtggccctggccgcggccgcaccaatccgcatcacggcggtgaacgcgaaactcggccaatcacaggtcagcccggcaagctatacgggcgtcaccctgcatgcgcaggccacgttgaccgccacgcaggcggcgatgttcaaagccggagacaaggcgcaggtcgtgctgccggacaacaccaccgtcgaaacgacgctcgcctcggtcgatcagggcgggcagaagaccggcgacaacgggcaagccacacagccatcggcgcgcatcgacttcccggaccagtcgcaggtggcggctttcgggccgacggccgtgcaagtcatcatcccgaacgccgatgcctcgaccggggaggcgctgatcgtgccggtgaccgcactgatcgccagcgccggcagcgcgtatgcggtcgaagcggtacgcggcggcaagttggtgcgtgtgccggtgtcaatcgggctggtgtccgacgcgcaagtgcaaatcaccaagtccgacggcctcaaggcgggagacaaggtggtggtctcatgaacgacatcgagtttgcccccgctggcccagagcatggggcattgctgacgttggagcatgtgacgaaggcgtttccaggcaaggacgggagcgtgctggagatattgcatgatacgtcactggccatcgatcgcagcgagctcgtggccatcgtcgggccgtccggctcgggcaaaagcacgctgctgtcgttactgggcacgctggacatgccgacctcgggaatattgcgatacgacggcggggatgtgaatgcgatgggtgagcggcagcgcagcgtcctgcgggccgcgcgcatcggcttcgtgttccagcagttccatctgatcgccaccgtatccgccttggagaacgtgatgacaggcctgcaatacacaaccctgccgcgcggcgaacgtcggcaacgggccgccgaggcgttggaacaggtcggattggggaaccgcctgcatcaccggccggcccagttgtcgggcggcgaacagcagcgtgtggccatcgcccgcgccctggccaaacggccggacatcatcttcgccgacgagccgaccggcgcgctggactgcgaaaccggccacaccatcgtcgacctgctgctcacggcggccgattccggcgcaagcctggtcatggtcacccacgaccagaccatcgccgcacgtttccccaggcgtctgcacatccaagacggcctagtcaccgaactcgacaagccgaatcaagccccctctgacgaggggctgtcagccaaaggctgactgggggagagatatgagtgaacgtactcctatgagtaaaccaatacgcacgcgaattgcggatttgatgcatgcggcttgggttggggccgccgggcgggcgtcccgcacggtgctggcatcgctgggcatcgcgcttggcgtggccgcatatgtggcgttgtccggcatcgccgcatcgaaccaggcagcgctcctcgcccaactcgacgcgcttggcgcgaatctgttggtggtcgcccccggcgtggacgccgcccagcagaaggttccgctgccggattacgcgcccacaaccatcgcccgtcagccgcaggtcgaacgggtcggtgtcttcgacaccgcgccagagaaggtgcagatcttcaagaacgggctgtgccccaaaaccaacggcaacgcgctggccctcgccatcatgcggcccggcgcactcgacgccgtcggagcaagcctcgcccaaggtcatggcatcgacgcgaacaacgagcacctgcccgtcgccgtgctcggctcggacgccgcctaccggctcggcgtcaacgagcccggcgaccgcatcctcatcgacaacgcatggtacggcgtcatcggcatcctgaaccccacgccgcaggctgaaaacctgaacgccgccgtcatcatcggcgagcaatgggcgctcggccggtaccccgaccaggccgacaccatcggacggatcagcgccatctacgtgcgcaccacgcccggcgacgccgaaggcacccgccgcacgctcgcccacgccgccaacccggccggcggcaacgtgtccgtcaccgcgtccgccgacctatccaaagcgcgcaacaccaccaacgattcactgaccacgctcggcctgatgatcggcgtgatcgcgctggccgtgggcggcatgagcatcgccaacatgatgattgtcaccgtgatggaacgtcgcggcgaaatcggcctgagacgcgcgctcggcgccacgcccggcaacatccgcatgcaattcgtcaccgaagcggccctcctgtccacactcggcggattcgccggcatcgcgctcggcgccggcgctgccatcggcgtcgccgccagtgccggccagccgatcgccctcgactggacctccctgccgctcgcctgggccgccgccatcctggtcggcatcctcgccggcctctacccggcctcccgcgccgcccgtctcaccccgaccgaggccctgcgcggcgaataggggcgacggctggagtgaacgatcaccatgagtgcgcagcctcaatgtcacttttactgcacatgatgacatgtgcagtaaaagtgacatattggtgctgggcgggagagagcacgcgtggcgcgggcggggtgtggttcgcggctatcggctagtatggtgcggtcacgacagagggaggcatgctgtggccgatgtgatgcgggagctggaacggctgcgaccggtgtatgagacgggcgtcctgcggttgctgttgcgccagaacgcgatgctgtacgtgtctctgctgcgttccacgttcgacccgctcaccggcgagctgccgcgcgagaccgtggaggagcggttcacgcaaagtctgaacgctctggccgacgccggcgaatatgcgccgcgcgaggaccagaccttcgccgaggccgcccatcagatcctcgccgacctgacccgtgaaggcgaaggcgactacgcctggctcgccaactcgcatgatgcggccacacaccgattcctctaccgtttgacggcccgcgcccaccgcgccgtcgaggcactgagcaggctcgaagacgaatcacgcgccctgtccggcgcgcaggccaacagcatcatcatggaaatcgaacacgcgcgcatgcagctgaccgccgaccccggcgagcgcatcaaactcctcaaccgtgaaatcaaggaacgcaagcacgagatcaaacgcatccaacagggcaagcagcacgccacgctgagcgaagcccaagtggaggacgtgatcgccgtgatccacaacacgctgcgcggcgtacccatcgacctgcgcgaactcgtgctcgacgagcgggacaacggcgacgccttgcgccggcgcatgcagaccggcgacatcagcgtggacgagaacctgacccgctaccacgacgaataccgccgctcgttcagcgaatcggacagcggccgccgcttcgaggacgccttccaggtgatcatcaccgacgagggccgccagcaaatcgacgaagccctgcgcgccatcgccaaaaccccgtatctggccggcgaatccggcgtgctgctcggccagatccgcgacgaactggcccgcatctacgacggcatcgaagccgtgcgccgccagatgcgcgtctccgacgaggcgatcagccggctcgtgcgccagcaaaccgacactcgctaccgtacgatgctcacccgcttgaaccgactgtacgcgcgcctcaacgcggatgcgaaaacccatatgggagacgcctcgcgcccgtacgacacggccaccgcggacgcgctgttcgcgccattgccgatgcgcccggccaaatccatgacccgcgccgccgcacccggcctgagcgacctcgccgccgaagccccgcaggcgactccggtggccgatctgcgggatatggtcaacagcggcggcccccgactcctgcgcatggtcagcctcatccggcgcaacccggtgaccgttgacaggtccgatgacaggtccaacgcaaccctcgtggacatcgccgccagcttcaaccggctgcccgaaagcgaacgccgcgaaagcgagatcgtcggcttcctgggcgggctgggagccgtaagcggcagcgccatcgccgacgagccgtccactgacggcgtcggcatcgacagcgacatcgccaccgagccggccccggcgcagcgcggcgataccgcgacttggcattgcgtatcgatcgacggcgagccccggcactggatcactagaccggtgctggccgacatggacgagctgaacatcattgtggaggaaggatgaccgtggccgaggaacacgaggagcacatggacaacgccaacccgtacgccctgttcgaaggcgacaccggcgacatgccggccgaggcacgcatggccgccatcgccctcaaacgcgaccgctatatcagcgggcccacctacgacaccgtgctcgacaaccgcgacgtcgtcgtacgctccctgaacaacgacctgctcgacttggtgatcaacgaacgctaccgcatcatgtacgccacgcccgtggccggcgacgacgtgaccctgcgctcgctcaaaacccgtgtcagcctcaaacgcgaggaggccgcgctgctcgccttcctgcgcatccgcgtcctcgaatacgagaacgtgcacgccgaccccgccgactggctcgtcagctttgaggagatccgcgccgcgctcgccaccggcgccggttacctggcagcccgcaatgacgaggaaggcgtggcaaagcagatcggcgccatcgtctccgcgatgatcacctacgggtatttggcgcgcctggacgacgaagccatgtaccagatcacgccgctcgtgcccgtggtgctcgaccgcgaactggccgacacctggctcgacgtcgcggaacacggcgacggcgacacggaagatgacgatgacgacgagaagggagccgaatgatgcaggcgacagacgtgcagatgatcgcggaccggtggatgctggaatcccgccgactcatcaactggggctcctatgagggctaccacgaattccgcccctccacggaccacaagctgccggtgaccctgctcgccggcgccagcgaatccggcaaatccacgctggtcgacgcgcagatctccctgctgtacccgaccggcacgccgttcaacaaggcctcgaactccggccgctccgaacgcagcgactacacctacctgcgcggcatggtcggcgtgggcagcaccgaaaccggcgacgagccgctctacctgcgcggtcgcgacgagaacggcgcgccgcaacccgtgtggggcgccatcgtggacacctatcgcaaccagaccaccggccaggtgctttcctgcgccaaattcctctacctgatgcccggcgacggccgcggcgacgtgcgccgccagtacgtggtctggggcaagcccgtggaccccaggcgcatggaccaataccgtgacgccccgttcacaccagcccagctcaaagccacctaccccgactgcctcacattccccagcgccgaagcgttccacacacacatctggagcgcaatgggcctgagcgaggccgcctgccgactgctgcacaagatccagtccgccgacgcgccctcccggctcgacgacatcttcaaacaaggcgtgctcggcgtgcccgaagccctggacctggcccgcaccacggtcgaggactacgaacgttacgacgagaacttccacgccatggacgagaagacccgccgcatggacacgctgcgcggcatccaacaggcctacggcgaatacgccgccgcacgcggcaaggcccgcgccttcgaaccggtcaagccggccgtcgacggcacggtgccggccgtgctgcgcgactgggcattggcccgcatgcgcggcgaagtcgccgtccaactgcccgccgaccgcgccgaacaacagaacagcgaggcggaagccaagctgctgcgccgccgaaccgaagacctgcgcacccgcctcgacatgatccgaggccagatgcagggtctggacggcggcaacctgacccgactcgaactcgaactcgaccaggcccgccgcaccctcgaagacatgcaagccaaccgaacacgaatcgaacaaacgttcgcatccatcggtgagacgctgcccggcaacgaacagtcctggaacgaacgccgcatcaacgccgtgaacttcaaacgcgaatacaacaaacgagacggcgaatgcgaggaagccctcaccgccgccatcaacgcacgggccggcgcacgcggcgacctcgaacgactgcaacgcgacttcgaccggcaacgctcccagcgcacccgcatctcccagcagatggacgaaacccgcgccatgctctgccgcgccaccggactcgcccccgccgaactgccgtacgtggccgaactcatggacgtgaacgaacacgaggaagactggcgtctcgccatgaacgtcgcctacgcgcccatcgcccagaccatcctcgtcgacaagcgccacgaacagggcttcgccgccaaagtcagcaccatcgacccgcgcaccatgccccgacgcacctggcagttcgtggacaccgcacgccactacgacgacaccggcgcgcacgcgaacatactcaccggagaacaggacggcgactggctgtccggcaaactgcgctaccgcgacgactcgcccttcgccgactggctgcgctcgcagacccaggacgaacgattcgacgccctatgcgtcaccgccatcgacgacaccgaccgcaccaaccgtcaggtgcaggccgacggtcagatcaaatccggcgcacgcggccagcacggcaccaaagaccgcgcccaggtcatcggattcgtcaacgaaacctacctcaacgcgctcgcagcgcaggtcgacgccgcccgcaacgcgctcagccaagccgacaccgactacacggccgccaaaacacagtccgataacctccaccgcgaactcgaactggccaaccagctcgcctacacgtcctgggaacgcatcgacatcgccggcgtgcaacggaccatcacagacacgcaggacgccatcgcatccatcaaaaacgatcccaaactcgccgaactcgccaaacagcgcgacgaactgaacgccgaactcgaccgtgtggaacgccagcgcatcgaatccgaccaggccgcggcccgcgccggcagcgccgtcgaagcggcgctcatctggctgcgcgaccatgccgacaccggcacgacggacgccgccggtgccaccgccgacaatgacgatgacgccgcttccggcccgctgccggacgaagtcacggcggcgctcgccgaatcctacgacaaccgattcgccgggctggcggacgcggccatgcgcgcgcacatgatcatcggcgcgggcgtggccggaacgcaggcgccgggggagagcttccccgaacgcaccatcgccggcatcggcaaggacatggcctcccgcatcaacctgctgaacggccaggccgacgccgcacgcaccggcgtcgaatcgaaaatgagcacctacatcgcgctctacgcggccgacgatgattcgctgaccgccagcgtggaggactaccggtactatctcgacgaactcgccagcctcacccagctggccgcggtcgccgccaccgacgccgaataccggcgctgcctcgaacagctgctcaggagcttcctgaccatcaaacgcgccatcgacacggatgccagcgacatccacgaccagcttgaccgcatcaacgccatgctcaagggccaacagttcggccccaagcacggcagcctgtccctgcacgcggacgtgcgccgtcccgagcgcaccttctgggcgcagctcatccgcgtcatcggcaccctgaacgattggaaatccgccgacgtcaacgattccgacgcctcgcgcaaggctttcgcggcctgcgcgccgatggtcgggctgctgcgcgccgaactcgcgcaggtcaaggacacgaacggcgtgaaaagctacggcgcccgcaacctcgacccgcgctgccgctcgtccttctacgccatcgtgcatcatgccgacggtccggacgaacgcatcacctccaccggtggtcgctcgggcggcgccttgcaggagctcacctcattcgtatacggcgcggcgctcatctacctgctcggcggcggcctgaccagcgaaccctcgtacaccacgctgttcctcgacgaggcgctcatcaaggccgacggccgttacacgcagcgcgccctcacggtgctgccgcgcctcggattccaggtcatcgtctccgccccggaaagcaagaccggtgaaatcctc

SEQ ID NO: 3104 - DNA, 58153 bp, Unknown
  R215_18m  MAG No. k141_8088
tccgcaatgttcaaccccgcctgcgcgagaacctgcgtggcgaactcacgattcttcggaatcgtgcgccgctccagccacgtcgtcagcttcgcattatccggctccggagccaacggaaacggcagcaacgcgcgcttcgactcatcgaaccagcggacatgcgcctcgatcttgcccgccagcaggccctcgccatacgacgcatcgaaccggagcagcggatcatcatagagccgcagcacgtaactcgtcatatccggcccctccaatcaagcccgctccaaagtcatatcgggcgattcacatatgaagaacaactgtctacagtatagacaagggccttggaacgcgggggcttcactctgaagtcaagtatttgatacaatttggtgcaaaaagatagtaaatagcaataaggagtggctatgagcatgcagattgccacgcgagttgatgacgagcaggctgcgttgtttaaggagacgacccgacagctgggtaccaccccggccgatgccctgcgtatgttcatcagcgcgttcaatgattaccgtgggttcccctatgaggtgcgtttgccacgaaatgacgtggagccgtttgcgtccgagcgggacgctactgagtatgccagtcgtctcgccttgaggatgtccgatgaaacgaggtgagatttggacgttgcaggccgatggctacgccagcaagccacggccggttgtcatcgtgcagagcgatgccgtcgatcggttcgattccgtcatcacttgtctgctgacctcatacgattcctccgacatcgacacgcgggtccgattggaaccaagtccggagaacggcctgaacaaagtgagttacgtgatgacggacaagatcgtcaccgtcgaccgcaaactgctgggataccaagtcggcgtggttgatgatgcagccatggcgaatatcggccgtcagctcatgcgggttctaggtttgctgtgacgtttgggatggctggcgggcgtgcgtctacttgtgacatcgtttatgcacccttgaggccgtatgatgatggcgtcgaattcaagctctccccaacgtctaagaaatggcttccttcatattacggtcatacgaccaacaccatatgaaggaagccatcatgaatggtctaacggcaatcagcttctcatacgtgattgccagtcattcaccgaatcagccgcggttgtcgaacatctgcagcagcatcttgctgggttcgacggcatagacggtgtgcggcagacgggcgctcaggtagacgatgccgccggccgtaagctcgacttcacggccttcgccgccgacgcgcagcttgccttccagcacctggatgatcacgggcatggccgcggtgtgctcgctcagtgcctggtccttgtcgaagccgaacagcacggcgcgcaggccgtcctcgtgcagcaccgtacgggagacagtggcctcctcctgaatatcgatcaacgaggccaagtcttcgatgaatccaagatgcggctcggtcgaaatggcgtggccttcggcgtcgtgggcgtcgtgcttgcaggcgcagtgcttggcctcacccgcttcagcggccgcggcttcgccatgcttgcagtggcactccttcttcgcgcccggctccgcggccgcgccctcggcgtgctcgtgcttgcaggcgcagtggtgttcgccgttggcggcagccgcctcggctgccgcggcggcttccctacgctgcttgcacttgcaatgctgctcgtcgcgccctgccttgcatgcggtctgctgctcgttctcatcggccatgatgttctcctattcgtcgcgcgtacctcacatacgcgtcatcgcttttgcttgtttcccattatccggccatcgttgggccggcacaccgctgttacgcttcgggcttgcgtacctcatccttgacggattcgtccaggttgtccggctacaggccgagttcgtgaatcgagtaggtgccgccggcgcgcagcagtcggaaggcctcgccgataatcgcctgcttgccacgctcggtctgcatggtaagcatggcttcgccgatcaccacgtcggcgctgttggattccagaccggtgtcggcggcgtcgcgctgcacgcagcttgccggaatcgtggccttctcactggtgagtttggagatgatgtccacgacctgcggatcgcggtccacgccacggtagctcttggggtcgcggtcggactgcggcaggggcagctcgcggttggtggcgggtttggtggcggtggactgaaatgcctgagaaggctgcggtgtagtggtcatgtgtcgtgatgctatagtccacagcccgcccgcacaagggttttcgctagaaatcagccgaatgtgagaatgctcacccgagtaggcgcctgagcatgcggctcagggacgattcaggggatgctcaggggtcccgtcaccgattccccacatatcgcccgcgttcgcctaatagaatggaatccagcattcgattcggtatccggcgcaatgccggcaaatgtgaggaacttacgatgagggtcatcggcaatattctgtggatcattctgggcggactggcaatcgccatcagctgggcactgatcggactgtttctatgcatcaccattatcggtattccactaggagttcaggcgttcaaaatggcgggccttaccttgacgccgttcggcaaaaccgtgcaatacggtggcggcgttggctccacgctggtcaatatcctctgggtggtgctggtcggctggtggatggcactcggctatctgggtgcaggcgtgctcaactgcatcaccatcatcggcatcccgttcggcctccagtcgttcaaaatggccaagctcgcgctctggccgttcggcgcacagatctacagtctgtaacaattgtttctgcagtaagtccggtgcagcgcattatcatcgtgcgttgcaccggactttttatatacaacgggcatttcacacaccgcgtgatttgacggattcggacgtaagaccttatggtgcgcgaaccatgatcaacacatcgcattcagcagcaacggcgtgaacgaacacgccatctgatcagtacacctctcattgacgcatagctgaatcattgccggtgatatcgagccgactcgttcgcaccatgccccataaacgtacctatacgagtatgcgttcttggcatagtcgcaacgcaatgcaccgcggcaaaacccattgcataccatcacatattcagaaagaacaacagatcatgaagtatttcactactgacacgcatttcgggcactaccatatgtcactcacatgcagtcatgcgcacaactatatttttgtatcatccatgattttatagttgtttattgactcatttccttctctatcttatactttctataatcaaggatgctctttgggaagtgagtctctctcatggatatgaagtatagaagtttggcaaggctgttccatgccgacaggtcagtcgattccttcaataaccatgcggcactcgcacggcagcggcttgaggcagattccacattcaggaccggggtcatcacgccattgggcgagctgttctccgccacgccacgcgagacgaccctgctcatggaaaatatacttctcgccgaaaggcgcatatcacggctctggaacctgattcccggcgtcatgcactgggactacatacggcattccatcagtgaggaactgttcgccaccaacgagatggaaggcgtgcgcagcacccgcaaggaaacccaggacgccgtggacgcggccgacaaggcaaggagggacggcgacgactccaaggcgcggttcagcgaatttgccaagttgtacctgaatctcacggacaaggactccgcgttgccggcaggcatcgccgccatccgcgacatctacgacaaggtcgtgctcgacgaaatcgatgagagcaatcagccggacggcgacctgttccggaaaggcgatgtggaaatacaggggccgcacggcctcgcgatccataacggagtcaaaggcgaaggcaacatcggcgcactcctcaccgatatgatccatctcgcgacctccgacgagattccccggctgcagtcggccatcatgtcgcacttcctgttcgaatacgtccacccgttctacgacggcaacggcaggaccggccggtatctcctggccctgtacctgaaccatgacctgactatgcccaccgtgctatccctgtcccgcaccatcgcggagaacaagaacgcctactacaaagcattcatggaggcggaggacaagctgaactgcggcgaactcacgctcttcgtgaacaccatcctcggattcatccaacaagcccaggatgagctgattgacgaactcagtatcaaggtcgatcagctcgacaaaggtcggatactctgtacacagcttgaaaagaggcatgccctatcgcgcaatgccgtctcggtgctctatggcgtgattcaggaagagctgttcgactcgtccaaatccatgtcgttggacgaagtggcccatcacatcggactgtccaaacagagcgcaaggaaatacgtggaagagctcttggccgcggggctggtcgtacagaccggaaaacgtccgctgaaaatacaggtggcgaaatcattgaggaatgttctcgtcacaggagtcgacgagaacgcggaagcctaagaaaagtagacgcaaacatctcatctcaacgaggttcataaaggttcgtaacatgaagaaaggtctgggcaaccaacactgctcggacctttccgcaacactcccgtcagtcgctttccgcgacggctcccctcaggaaggggagccgaggaaaactacttggagacgttaaatttgaactccacaatatctccgtcggccatgacgtagtcgcggccctcctgacggagcttgccttcctccttgatcttggccatggagccgtcggcggccacgaaatcgtcgtaggagacgatgtcagccttgatgaagcccttttcgaagtcggtgtgaatcacgccggcggcctgcggggcggtccagcccttgtggatctgccaggcgcgcacttccttgacacctgcagtcaggaaggtctgcagtccgaggatgtcgaagcccacgcgggccagttggtcgagaccggactcgctcaaaccagcgtcggccagcatttcgcgggcgtccgcctcgtcgagctcggtcaggtctgcctcgaactgagcgttgaggaacacggccggagccggggccacggatgcggcgagcttagcctgcaggtccttgttggccagctcgttgtcgtccacgttgaacacgtagatgaacggcttggcggtcatcagatgcaggtcgtagacggaatccttgtcgaagcggccttcgcgtgcggccttgtcgagcgtctcgccggcttcaaggatggtctttgcctgcttgactgcgtccatgtaggccggctcgatcttcttgcctctcagatccttctccagcttgggcagcgcgttttcgatggtctgcaggtcggcgaggatcagctcggtgttgatggtgtcgatgtcgtcggccggatccaccttgccgttgacgtggacgatgtcgtcgtcctcgaaggcgcgcacgacctcgcagatcgcgtccgcctcgcggatgttggccaggaacttgttgcccaggccttcgccttcggaggcgcccttgacgatgccggcgatgtccacgaaggtcaccgtggcgggcacgaccttttcggtgtggaccagcttggccagcacgggcaaacgcttgtccggcaatggtacgatgccggtgttcggctcgatggtggcgaacgggtagttttcggccagcacgttgttgcgggtcagtgcgttgaacatggtggacttgccgacgttgggcagtccgacgattccgatagtaagagacatgattccagtctagggagaagctggacacattgaacgtgcatgtggtgaaccggccatatgcaaaggcctccgagcatacggctcgaaggccttgactgtgatatgcgaatatacgcgaactctgattggcagtcagccgacgatggcgtctacggcgtcgatgaccgagccgcggaacccgtccttttcaagctgggcgacgcccttgatggtggtaccaccgggcgagcagacggcgtccttcatggcaccgggatgggtttcagtggccatgtagagcgcgccgacaccttcgaccatcttggcggcgagccggtaggcggtggctcgctgcagaccgtactgcacgccggcgtcgcccaaggcctcgatgtacatgtcagtgaaggcgggcgcgcagccggccaccaccatggcgatgttcatatgcggggtgtccacgcgctcgatgaggctgatggggccgaatagctgctcgaaggtttcggtttcgtcgtaggtcagtgtgttgacggattcggtgacgagcacgcccttgcccacggccatcggagtgttcggaatggtgcactggatatggatgtccgaagagtcgacggattcgccgtcttcggtggtgaacaggtcctggtacttcttgagattccagccggcggcgatggagacgacgatcttgcccggcctggcaagttcgtcggccagcggcttgacgacggcggcgatctggtagggcttgatggcgatgatgaccacgtcggcggccgtcaccacttccagcgcattgcgcaacggacgcacgccaagttcggcggtggtcttctcaagcttgtcgtagtgggcggcgcaggcaaccatctggccgccggcgaccacgcccgcgtcaacgaagccttgggcgatggcctgggccatgttgccatatccgataaaaccgatggtgaggttctgagtcatacgttttcctttcgtgcatgtatacagagctccctcatcagagggagcttgcttccttgagtcagaacagttcttcgaggtcgccccggttaagggcttcgtcatagagatgcttgaagacgagcgggccgtgcagaccatcatgctcgaattcgttggtggtccagtagtggctgttacccacgcggctcaaggtgtcgagctgcaggccggaatcgacatacatgtcgtcgaaatagacggcggcctgcaacggcacctcattgcgggccagctgttcttcgtcatagatcacgccgaagtgcgtgtcttccatgagcaggtccatggccggcctgaacggacgtaacgcagactcctgttcgaacatccacgggaacatggcctcgccggtgaagttgagcgggcgttcatcagcaccgaattcgggcttgccatcgcgcacgcgctgggcggcccaacgaatgggctcgtcaagctcaccgttggcgtagatgaactcctgcagcggccagtacagtgggcgcgacgacgtggcgttcatcactttggtcaaaaattcgtcagacaacggcgagtcggcagaagcggaaccatcgccatcaaggaaggcgtcgtcaagaatccaatggacacgctcgaagctcggcttcatgccaaagtcggatcccaagcactggaagcgttcgacggtgagcgggtcgccgttcggcatcagcgggaagccgtgggcggccatgccggcgatcacgccaagtcgatgctccacatcggtaccagccatcggattcagtacggaatcggtgagtttgccaacgaattcggcgacttccgcagtagtcggcagcttgtcggcgatggcggccacgcgctccttgtcctgtgggtagcgctcgtagaactgagtcgtcttgcgcaccatgcgcgggaaggtatgctcgtacacttcagcggcgtcggccggcacgtgcgggatgccgccggtggtgaagctggcgattacgccggccgggaacagggacagtgtggtcagggtcaggaagccgccgtagctttggcccatcgtcacccacttgcggccaccgaattcggtcaggcgcagatgttcgaagtcacgcacgatggaatcggcaaggaacttcttcaggtagtcggcttgggctcgtgcgccggccgcggcatcatcgtcgtgcgcggcggcgatgcgggccatggcgtgcgtgtccacgcgcgaggagcggccggtgccgcgctggtcgggcaggatcacccggaagtgcctgatggcctcctcgatccatccgtcggaggtcgggctgttgaggcgcgggccggcaccgccgggaccgccttgcagaaaaatcagcaggggcaggtcgtcatgcacgtgttcgggcgcggtgaccacgcgatagaacagtttgatggtttcgccgtcgaacgcttggcctggctcatggccggtccagtcgagcggaacatcgatggaatggtcctctatggccagtccgggcacgtagtatttgctcagcattgtcatggttcaagactctagtccataaatcctcctgaagagtgataccggttcgtcgccggacacgctagccttgcgcgttatggagattatggcgcgcgtgagggcatggtgcgcacgggagtcgacccgcacactgctatgggacacgttgctcgccgcagcgctgatcgccggctgcgtgccgttcatcggcgacaccagccctgattcgacgggcggcatattgtttcccgcaactcaggcgtcgatgacgctgtggtcgctgccggtcttcgtgccgctgatgctgcgcaggtattgcccggagccggcggcctggctgttcgtggcgctgaccatcacgcatcttgtgttcggcccggcgatcatgtatttcgatttctacgccctgatcatggtgtattcggtgattctgtacggcaatccccgacattcctggcggttcatcgtcacggcgttcgtcatgggactggtcgcggcgatggtctggtcggtgtctttcaacgtgggtccgctgttcgacggaccttcctccggttcgcgcgtcatccgcgacggctggctgtccgatgccatcacgatgcccacatgcccggcggtcaccggcgtcgtgggggcaagcggcgccgtcaactgcggggccaagatgctcgctgacttcggcatggaggcggcgttcatcgaatcgagcgtgctgagcgtcatcatcatggccttgtggcagcgagcgcgcaacgccacgctggcggccatgcgcgagcgcaacgcttccattgtggcgaaagaggccgaggagacgcgcatcgcggcgctggccgaacgcgcacgcatcgcccgtgatatgcatgatgtggtggcacatacgctctccacgattattgtgcagtcggatggcggccggtatgcgggtgcgcatgatctggccatcgccaagcacacgatgggtacgattcgccatgaagcggaacgcgcgcagcatgatatgcagcgtctgttcaatgtgttcggtgcgagtggcagtaccggatatgccgacatcgattcgctgtttgacggtcatctggtggtgtcccggcatatgaccggcaaagcgcaacctgaccggctgtccgccgacgcggaaaccgccgtgttccgtcttgtgcaggaagcgctgaccaatacgcgcaaacatgcgggcgagggtgctaaagccaccatcgatgaaatctggtcaaacgatgtgctgtcgattaccgtatccgataacggccgtggcgcgacgtctgcagcagacggccataagcccggatacggattggttggtatgcacgaacgcattgagtcgttgggtggcagcgtgcaggccggcccagggccgaatggtggctttattgtggcggctacgattccgctctcccctgccgccccacagtctggcaccgatacggaggatccggtgctaaccgttatctcgcgtatacgaggattgatggatcgggcgcgccccaaagtactcgaccaaggagatacgcgtgagtcgaactgggtgggtcgatttgcgcagtggaccgagcggcactatcttctgatggacgttatcgccactatcgtgctgattgcgctatttgattccgccacgtatggcgatttgcaaatgatcggcaatgccccgtattcgccgaaccgcgtgccgactataacgctgacgattattatgctctcgcctttggcgttccgtcgccgcttcccagagggcagcgcgctggcgatggcggtgctgtctgctgtgcaactgttgttcttgccatcgattttgaccatcaatatgtttgcgatggtatccgtgtattcggcggtattgtatggacgagagtccgcttggcgctgggtgagcgtggcgctggcagccgattcgtggcttgcgggcatcaaggtgatggctgggtggaatggatacagtcagctgttccatctgtttttgcccgatggtagttccatgctctcaaaatggaggctggttttgtccggcttgctgccgggcgcgggaatcatgttggtcggttttgcctgcattgcgatggctcgatggagccgttcgcgtggcgcaaacgctctggtgctgttgcgacgcgaggaggcgctgcgagccgagcaggagcggcaaaaggtgctggcggccaacttagagcgcaaccgtattagtgcggcgatgcaaaccgaagtactgaccacgctggaatcggtgattgcgcaggctgacgagggactggtgatgctcaacgccgaacctgcgcctgatagtatgcagattgaagcggcttttgccgcgattggtgctcgggggcgcgccgcattggctcatatgcgtcagctgttgagagtgttgcgtgaaaccgggttcagcgacgaggcccatgagggtgtgcagccggatatgcagttgcgaccggcggcttcgttggatagtcagatgcaacacgcgggaacgttaccccggtgagagacttgcccaataagaactcagggaacaatcagggtgtttatggagcggcgctccgataggaaacggatacagtggagagcatgaacgagagcagaagcattcgcgtgattattgcggacgaccaggagctggtacgtgccggttttgccatggtcattggttcgcaaccggatatggaggtggtcgggcaggcgtccgacggcgcccaagccgtggcgttggcggaatccctgcatcccgacgtggtgctgatggatgtgcgcatgcccggcatggatggcattgaggccacgagccgtattacctcactctccgccgcgccggacaacgcggccgattcggccagcccggccgccgacgcgaccgtctcggccgaatcggctgacgaccggccgacgcgcgtaatcattctgacgacgttcgatttggacgagtatgtgatggcggccatcaatgccggcgcctcgggcttcctgctcaaggacaccgaaccggaaacgttgctcaattcgattcgtactgtattccaaggcaatgcgattatcgcgccttccgccaccaagcgactcatcgaaaagatgatgcaggacggttacgcgcagcatggttcgctgaccggcgatgtcgcgcgctccggtgccgtgtacggttccgccgtcggcgtctctggcggtgcggccggcaacggtgccggctcgatgaccggcatcccctcccctgccggggccgcttccgacggttccaatacgtcacgcccagcatacaccgatcccgaactggatctgcttaccgaccgtgaacgcgaggtgctggtggagatcgcccatggtctgagcaatcaggagatcgcggacaagctctttatctcccttcccaccgtcaaaacccacgtggcgcatatcctcgccaaaatcaacgcccgtgaccgcgtacaggctgtagtcttcgcgtacgataacgggctggtgtaacaaataagctccctctgatgagggagcttattgctctacgcttcggccaaggcttcaactggtggcgttttgacggcccggcgggcgggtgccacgctggccagcagagcggcgagcgcggcgacgccgagcaccacaccgttggtggcccattcgaacgggaacacggtgtcgccgtacaaactaaacaccatgtaggatccgagccagccgaacagggtacccaataccactcccaccacgccggagacgagcgaaagcagcaacgcctccaccgccagcgagcgccgcagttggccgcgcgtcatgccgatggcacgcaaggtggcggattcgcgtgtgcgttcgatcaccgacagactcagcgtgttcgctacgccgaccaaggcgatgagcacagccaccgcaatcaaaccgaccaacaatgccatcatgccgttgatcatggtctcccattgcgtacgttcggccaccggaccggtcacggtaacgccagcactggcggagaacacattctgcacgttggtgaatacgtcgttcagcgcaacacccgcgccctcggcgtcaatacgcataagcatgatatgcccgtcggccttgattccaccgttggtgaagtggctggcgtccacgaaggcgaccgcggcgtagttggaggcaatgcggcgatagtccaccttccgcggtttgagcgtcagcgtctgtgtgccgccggattgtccattgccgttttcggcgctgccgttcgcatcattaccggacggaccattggcggcatcggcttgtgcttcggccgctccagccgtgaacgtaacgctcttgtccagcggaatatccttgcctgtagcggcggaatacttgggcatcagtacggaatcgccatcaatggtcacaccggacaaatcggagcgcaccaccttgcgcagcgcgtcgacgccatccacgcccacgaccagcacactcaggctcttgccgtcggcatccttcatggtcatcatgcgggtcggcgcgtagatactgctctgaacgcccttgactttggctgcctcgccggcctgtttgccagtcatatcggcgccagcggcaatcatgtcgacgctgtagcgcgtggtcagcgcctcgttcatggtttgcttggcgctggcggcaccggtggcgatggtggagaccagcgtcacgccgataagcagtgcggcaccggtggcggccacgcggcgcgggttcttctgaatgttcgcatgtgccactttggcggacggaccggccagtgcaaccagcgcgcccacgccgcgcatgagcaccggtagccagaacgtggcggaaagcaccagtccaaggaagatcaatgcacatccgatgatggcggcgagcagcaccagcgaatactgcttgtcggccattgaatcacgtccggcgattttctcggacatctgccatacagagaatgcgcacagtgccacgccgcccacaatcagcagcatggaaatcacggcgcggaccacaccggcccgtcgcgtgtcggtcagttcgatgggtcgcaacgcttccagcggggtgacggcggtagcggaacgcgcggagcctagcgaggcaatcaccgtcataatgatgccgaatgccataggcaccgtgaacaccggaccggatagtaccagtcgcatggtcatgccggtggctttcatcaggcccgactggcatagtgcggccatgagtccgatgcccaggcccactcccagtgcggaggcgatcagtcccagcacaccggcttcaaacagcacggagacatacagctggcttttgttcgcgccgatggtgcgcagcagggcgagtgtgcggcggcgctgtgccacgagcacttggaaggtgttggcgatgacgagtgccgcgaccagcatggcgagcatgccgaagctcagcaggaagatggtggtgatgctggtttcgcccgagctcatgcttttgacggattcctcgacgagcgcggcacgggattgcacgctgaaatgcttagggagcagtgtgctgacctgttttacggtggatgccgcggccgtgtcgctggcatcgtcgatgtcgagatagacgagatagacaggcaggttgccgaaatcgttgctgccggccattgcggtgatgacgttgtcggaaagcacggaagcgccaccgtagtaggcgtaggcaccgttcgggtcgtcggtgaggccgaccacgcgcacggtcatgccggagtcggcggccgtgtcggtgccgtcggatggggcggacgcgccggacgcggcatcggaatcaccgtcgtgcgagctcgtgccatcggcgttctgggccgactcatcaccagcgtcaccggtattaccggccgaatcgccggtcttggccgcatactgcgccgcctgcgagttgacggtcacacggtcccctaccttgacgccgagctggtcggctacggacttggtcagggcgatctcgttgctgtccgccggctggtctccttgcgtgatggtgaccggcagcagcgtgcgttttgtggcggtggtgatgacgtagctgctggcatgcttgttgccacgggttacggtcacggaacccgcgtagccggcacgtgcgtccttgacgcctttggtggcgcggatgcggtcaagctggaagtcgttaaccgtacgcgtgtagatgtagtcctggtccttatcggtcaggtccttgccgctatccgggctgatcacgtagttcgcgccgccgagctgggcggtattctgggcggcaagcgcatcgttcatcgcgttgccgaacaggaaggtagcggcgatgaacgcagtgccgatcaggatggcgatgcctgccggaatcagcatcctggcgcttttcttcataagtttcagagtgatggaaaacatgggggtatcctgtctctcgctttccggctcagcgagtgtgctgtgcggcggcgcgggcatggcgtatggtgccggttctcccggctgggggcaatggagcgtcggtgatgggcaggttgggcacatcctctacgccggcaagacgggcgagcgtgtcggcgcgtgtgctggtgacggcagtgcgcgtggcgcgttcgcgttcggccataagcagctcgttcatcgtttcggcagtaggattcgattcatcggccacgatctgtccgtcggcgaatacgatggcacggtcggcgtaggaggcggccaccgcatcgtgcgtgaccatgacgatggtttggccaagctcgttgaccgaacgcttcaggaagccgagcacttcggcgctggagacggagtcgaggttgccggtcggctcgtcagcgaacaccagcttcggcttggtaatcagcgcgcgggcgatggccacgcgctgctgctggccaccggacagctcgttcggacgatggttgagccgttgcttgagtcccaaggtttctacgagcaggtcgaaccaggcacggtcgggcttgtctccggcgagagtcagtggcatgaggatgttctgttcggcggtgaacatgggcaacaggttgaagctttggaagatgaagccgatcttgtggcgacgtagcaaggtgagctgcttgtcgtccatgcgggtcaggtctgccccgccgaaaagaatatgcccggatgtggcggagtcgaggccggcgagcgtgtgcataagcgtggatttgccggagccggacgggcccatgatggcggtgaatttgccgcgttcgaaactcacgttcacgccacgcagggcgtgaaccatattgctgccggtgccgtagttcttgaccaagtcgacggcctgaatagcgatgccgcgcgatgcggacgggttctgcacgttcataatgcctctccatatttggccggaccttatgcccggatgacgattccaacttatgaagaaataacggcgcgccccatcgtgcgccagactgaattgggctaggggccacgcgccggccctcatccttgaggattatgtcgtctcaggtctcacactattcatgcctctgcgcaaacagtgtgaggcatacagacgcaagaaagcccgcactgcatgacgtcagtgcgagctttctactccttgggtcaagcgatcaggcggaaggcaccccatgcggctcgatgattcgcgatgcaccccattagcatcgcgccccttctcatcgggccgtcaaccctcctgtcgacctcacttggccaagccggaagcgcgaagggcttcgaagccgcccttcaggtcatcgaggatgtcctcgatgttctcggtgccgatggacaggcggatggtgccctggtgaatgccctggtcctcgagctcttccagggtctcctgggagtgcgtagtggaagccgggtggatgacgagggactttgcgtcggccacattggccagcagggagaacaggtgcagattgtcgatgaagacgcgagccgcatcctttccgcccttgatatcgaaggtgaagatggagcctgctccgttcgggaagtacttctcgtacaggtcgtgatccggacggcccgggatggacgggtgggagacggactcgacttccggcacggtctgcaggtactcgacgaccttcagcgcgttctggacgtggcgctcgacgcgcagggacagggtttcggtgccctgcagcagcaggaaggcggcgaacggggacagggtggcgccggtgtcgcgcagcaggatggcgcggatacgggtcacgaaggcggtgccgccgagagcctcgtagaagttcaggccgtggtaggaggggtccggctcggtcagggtcgggaacttgcccggcacctcggcccagttgaacttgccgccttcgacgatcacaccgccgagggtggtgccgtggccgccgatgaacttggtggcggactcgaccaccacgtcggcgccgtgctccagcgggcggaacaggtacggagtggcgaaggtgttgtccacgatcaccggcaggtgatgcttgtgggcgatttcggagatggcctcgaagtccggcaggtcggcgttcgggttgccgaaggtctcgaagtagacgagcttggtgttctcctggatggcgtcctcgaactcctgcgggttctcggcggaaacgaaggtggtggtgatgccgtcacgcggcagggtgtggcgcagcaggttgaaggttccaccgtagatgttcttggcggcgacgatgtggtcaccggactgggtgatattacgcacagcgtattcaacggcagcggcaccggaagcgacggccagaccagcggtaccaccttcaagggcggcgatgcggtcctcgaagacaccctgggtggtgttggtcaaacggccgtagatgttgcccgggtcggcgagaccgaagcgagcctcggcgtggtcgaagttgtggaagacgtagctggtggtggcgtagatcgggactgcacgggagtcggtggccgggtcggcctgctcctggcccacatgcagctgcagggtttcaaaacggtacttcttgttgttctcggccatgggtctttctccttggttgtgctaggtcgcgaggatttttccttgccacccgcctgccgtgttcgggcggttggcgaggtgttggttatgaagttacgacgcttgggccgcgcggcgcaagccgaacgttatcgggcttgcctataagggcttataaagccttgggatcattgacgtgggagactgtcagaagtcacgaaaaagtcgttgaaattatcgcgacacgccgggccgcacgcatgcgctttcacggtcgactgcggtcacggtgatatcgctaccatgcctttcgcgcatggctcaagtgtccgtgatgattgcttgttccacccgtcaccaagacggtttgcccgctcggcgatgacgtctgttccttttttccgccgcccggttacatggtttacatgacgaacgactacagtcaaacatcgccaatgaattattccgccaacatggtgaagggattcgaacagacatgaccgatgtaacactgtatgaccgtgatccgaactatattccgcgcgtggccgccgtgcacgacatgtgcggctacggcaagtgctcgctgaccgccgcgattccgattctctcggccgcaggctgcgatgtgtgcccggtgccgaccgccctgttctcggcgcacacgcgctatgcagtgttcacgttccacgacaccacggatattctctccggttacttggatgcctggcagaaggaagacgtggaactggatggcgtgtattcaggcttcctcggctcccccgatcaggtggcgatcattcagcgtctctaccgtgaatatccgaacgcgctgcgtctggttgacccggtgatgggagacgccggcgaaatgtaccccacgtacacaccggagctgtgcgaggcaatgggcgctctggccgatggtgccgacgtgttgatgccgaacctcaccgaagcgagtattctcaccaagcgtgactatcccggccagaatattgatgaggccacggttaacgagcttcttggtgctctgctgaagttgggtgccaagaacgtggtgctgaagggcatcgaccatggcgatggcaaaatcgtcaactatgtggccagcgcttccaccggtgttgccggcaagatcgagctggctcatgaaaagctgccatacatgattcatggcacaggtgacgccttcgcatctgccctgtgcggcgcggtgatggccggccgcggcttggccaagtcggccgaaatcgccggcgagttcgtgcgacacgccatggtcagcacccgtgaccagccgcatttcgaggatcgtggcgtcagcttcgaactgaaccttggcgaactcaccgatttggtgaagtgaccgcaccttggctcccctctccgctcactgggtctgacgtattcagcgaacaactcggcgggttgtttgtcatcacaggtaagtcggctggggagccttggtaaaccttctgaactaatggtggataaccgggttttcatccacacgttatccacaacacgccaaaccgcgtcatagtatccacatttgccggttgcgcttgtgctcttacataagtaacccgcacagtggaatcatgaacgctttaccacctacccagccgacgacgaagtccggcatcgacgccggtcttgcctttcaccagcccatgctggcttcacctgatccgcaggcaacgctgccttcggaacggattgcggccacgatgggcgaccgcaatctgacgcccaaacagttcggtgcgctcggcgagcagtatgccgccgcgtggctggaggaacacggttggacgaccttgagccgcaattggcatacccgttacggcgaattggacatcgtgatgctcaatcccgagtacacggtggtgttcgtcgaagtgaaatcacgccggtccatgcattacggatatccgcaagaggccatcacgccggcgaaacagcacaatctcaggaaagccgcctgcgattggctgcttgaccggcgtaatcgtgtgccgcatacggcagtccgtttcgatgtcgtcaccatcgtgcttcgggtgggcagaccgctcgtgcatcacatcgaaaacgccttctgaattcgtcccccaaaaaacagccacgttgcgaaacacattgcgaaaggagtagacatggctatcggcagcactctctcagtcggactgatcggccttaaggccttcatcgtccaagtgcaggctttcatcagccctggcttgccatacttcagcatcatcggattgccggatgcatcgttgtccgaagcccgcgagcgcgtgaaatcggcgtgtcaagccactggattcggttggccgcaaacccgcgtgaccgtgaacatgagccctgcggccatgcccaaacgtggttcgtcgcatgatctggccatcgcggccagcgtcctatgcgcggcgggtgccatagggcatgattgcttggaagataccattgtgctcggcgaagtgaatcttgacggctcggtgctgccgattcatgggctgctcccgatcatgctgcatgccgaggaacgtggcgtgcgcaaaatgattgttccccatcgcaatcttgacgaggcttcaatggtggatggactggatgtagtgggcgtgaggcatgtgggtgagctcatcgaactgatgggcggcgatgccacctatacgattcccgatacaccggttgccgacgagaccaccacggatcaatcgcccacaagccatcccaacgattgtggcgatatgaacgaggttctgggtcaggaacatgccaaatgggcgctgcaagtggcggcggcaggcggacataatctcatcatgaccggaccgccaggcagcggcaaaaccatgctggcctcacgtatgcccggcatcatgtgcccgttgaacgaggcggaacaactggaggtggcgtcgatacggtcgctgtgcggcatactgcctcagtacggcatcaccgacatgccgccgttcgaggcaccgcaccacaccgccagcacggcggccttggtgggtggtggcagcggcatcgccgttcccggcgcgatcacgcgcgcgcatcgaggcattctgtttctggacgaggcaccggaattcagcgcacgcgccctgcagacgttgcgcgaaccattggaatccgggtatgtggcgctttcccgttcaaaaggcagcacctattacccggcctcattccaactcatcatggcggccaacccctgcccgtgcggatactattacggcaccggcgaacgttgcacttgccgggaaaaagaccgtattcgttatttctcgcgattgtccggaccgatattggatcgtgtggatattcagatggcggtgccaccggtctcgcgcattgccgcgcagagcgagacgatcggcgagtccagtgccgggatacaagctcgtgtgattcgcgcccgtcaagtggccaaggaccggttcagacagtatggatgggtgtgcaacgcgcaagcttcgggcaaatggctgcatgccaatacgtcgctgaaagcgatggaattggtcaatcgggccctgtccaatcatcaactcacattgcgcggggccgatcgcgccatgcgtctgtcttggacgctcgccgatctggccggccgcgtatcccccaccgagcaggacgtccatcagggcatcgaaatgagaacgaggatgacatgagtaacgctactgatatccgacaatctggcggcaccgcaggcagtgtggatcacaccgatacgggcctcgctgtttcgcgcaccattcccatgcctcccacggatacgttataccgcgccgcgctcacgttctgtcttgatggggcggatgtgatgatgtacgccacgctcaaaggcgcggaaagcgccgaatccctctggcacgcgttggcgcaatcccatccaagccagccatctggaatctgcggcccggcgctgtcacgcattgaccgcatgttcgtggatggcctcacccgatggggccgcaaggcgtcggcgaatgcgatgtgctccttccgcaatgcactggccggctggcataaccgcatgatggacctgccctcgcaagacatcatccaactggccgactggttcactatggatggcacgcaatggattatcggccccggccatccatgttggccctcgcagttggccgacctgtccattcgctccgattgggcgccaccgctgtgtttgtggatcaaaggcgatccacgcgcactgaccagttgcgccaaaccggtcggcatcgtcggttcacgggacgtgaccgaatacggccggtatgtggcacacaccgtagccgaacaggcagtcgttgccgggcatctggtcgtgtccggaggcgcaatgggcacggatgcggcggcacattggggagcgttgaatgcgctgcacggcagaatgcccgccaatgtgggcagaaccgttgccgtattcgccggcgggctcaaccatatcggaccgatgcgtaaccgcacgctgttcgaacgtatcgaggcgcagggtggtgcactgatcagtgaactgtgcccagggacgattcccgaagcccgtcgttttctactccgcaaccgcattatcgcggccatgtcttccacattgattgtgacgcaagcccggttgcgttccggagcgctcaacaccgcgggatgggcatgcgaattgctgcgcgaagtgtatgcggttcccggtgacatcaatcagccttgcaacgccgggtgcaataagatgatcggcgaccaccgggcgatgattctgtgtgccgccacatccactgaggatatatgccatgaacggcataagcccgttatggcggcatgcccaggcataccgaaatccacaggtcaggactcgtccgaaaacgaggaggccatggaagtgccggcaacgactccgttatcgccagcatcctcggaatcatcggcgtcacaggagtcgtcacaagattcaggtcattcgaaacgtcttaggaccaagcatactcagcctacactcgttcaatccaaggatgggccggcgagcgcaactgccgaggccggtgccaacaagagcaagggtgaagagccgccctcgtcgcatcagatgccggatcttcgtgtcaagccgaagctcgatcccgagaaggaagcccaacaacgtatcattatcgccaagctgccggaaatggaacgcacattagtggcattgattcgtgaatgccgtaaacgacatctcatcgtcaccccggacgcactattgcgtgtggcgcgagagacggtacccgacgagattcccaatatcggcaccatacttgagctactcggcgcattggagctgaagggagtgatcgagcgggatgccggcatactcaagctgagcagccgtgtcggctaatcggctttcatgacacggctcgaagactgttcggcgggtgtgcgagaatcgaacccatgagtccgaaacgtttggaagatatgtatgatgcggtgatcgtcggcgccggagcggccggcctgtcggcggcgttgggactgctgcgctcccccaaaatcaccgagctcaaggaacaaggcgtggacccgaagatcctcgtggtctccaaactgcagccgctgcgttcgcacaccggttcggccgagggcggcatcgccgcgagcctgggcaatgtggagtccgatgactggcactggcattactacgacaccatcaagggcggcgactggctcgtcgaccaggacgcggccaaactgctcgccgaatacgcgccgcagaccgtgatcaacctggagcgtcagggcgtggccttctcccgtaccgatgacgggcatatcgcccagcgccggttcggcggccacacgcgcgagttcggcggtgccccggtcaagcgcgccgcctatgcggccgaccgcatcggccaccagattctgcacaccttgtggcagcagtgcgtggccgccggcgtcgagttcgccgaggaatggtatgtgaccgacctggtgctcgccgacgacggcaagcaggcggccggcatcgtggcatttgacacgcattcgggcaagattcaggccatccacgcgcgcaacgtgcttcttgccaccggtggcgcgggccgactgttccataccacatcgaattcctgggacctgaccggcgacggcatggcattggccttggccgccggcctgcagctggaggacatcgaatttgtgcagttccaccccaccgggctcgcgcacaccggcatcctgctgtccgaggcggcccgcgccgagggcggcatcctgaggaacgccgacggtgagccgtttatggaacgctacgccccggagcatagggatctggccgcgcgagacgtggtctcccgctccatcatggcggagatcgacgccggccgcggcgtcgccgacccgaaggacccggatggtccgaaggactgcgtctggctggacatgaccggcatcgaccccgaacgtatgaaggaagtgctaccgcaggtggtcgaaaccatcgagcagtacgcgaacctcgatccggccaaggacctggtgcctatcaagcccactgcgcattacacgatgggcggcatccccatcaccaccaatggcgaggtgtaccgttgggccgacggtgccgtgcaggtagtcgatggactgttctccgctggcgaatgctcttgtgtctccgtacatggtgcgaatcgtctgggcggcaattctctgctcgacgcctgcctgttcggtacacgtgctggtcagacgatggccgcacgcatcgtcgagaacccggttgactcccccatggccgatgattcgaccgatgacatgctgaccgatgccgccgatcaggctgccgattcccgcaaggcagagcttgacgaactgctcgccggaccgatggacgattcagacgatggcgggcccaccgccaatccttatcagctcatggcccaactcggatcagtgatggagcaggctctggccgtacgttgcaccgctcagaccatcgatacggcgttgactcagatcaacaacgacatcacaccggttgccgataccttgcgggcccatgacaagaccgccgctttcaatcaggaggtcaccgccatctgggaagtccgtcatctaatcgaactggccgaggccatgctgcacgcttccgaatcccgtcaggaatcccgcggatccatgcaacgacttgatttccccgaacgcgacgatgagcatttccttgctcactcgatggtcgccgatgatggtccggcaagtttcaagccggtgcacatcaccgactacccacccaagaagcgcgagtactgatccgctggtggtaataccaagccgcctagggcttgtggcacaataggttggctgatattggacttgacatcccactgtttcatggaggcagaacatggctgaggcgagcaacacgacggttaccctgcaagtgcatcgtttcacgccgcgacccgagcgcgccgaacgtgcacgcggcggcagcccgttcgccaagaaaagctccccattcggcggcggctcggattcggcggcacgccgtcgtccgcgcggcaagcagtgggtgcaggaatacacgattcccgcgcgcccctcggacaccgtgctcgactgcctgctgaccatcaaacgcaccgtcgacccgacgctggccttccgctattcgtgcggtcacggcatgtgcggttcggacgccgtggccatcaacggcacccccaccctgctgtgcacggccaccatccgcgattgggccaagcagcccggcgccatccccgaagtcgatgacgaagggttccggcacaccggcaccgagtccgaagaatccgacgattccgcggaaaacgacgcaaacgcggcagccgaccaggactcggccgcaaacggctcgctgggagtcatcgaactggcatccctgcccggcttcccgccgcagcgcgacctcatcgccgacatcgacccgatgctcaaccaaataaggaagctcaccccatatcttcaggcggacggcgtgctcgccaccaccgccgaaggcaaggtggacgtgttcgaatacctgcagaaccccgaacaactcgccaaatacgagctgctgagcaactgcatcgcctgcggcgtgtgcgaaggtgcctgcccggtgtacgccggcggcgacgctttcatcggcccggcctcgctgatttgggcctcccgtttcgtcaacgattcgcgcgacaccaaggccatggagcgtatggacgccatcgacaccgccgacggcgtggccgcctgccagtccgtgcgcgcctgctcccgccactgcccgcgcggcatcgatgtgggcgaggagatgtggcagatcgtggccaaggtccgcgagcgctaagccgcgccacgaccagctacggcaatcgctgcaacacgtagtcgatacatccaccgggtgcccgcacgagagaagacataaaggaacgaattatggacagaacgcagtacaccaacctcgccaaggcatgggaattcaccgaggaacacgcgcgcgaacgtgaatccaatgcgttgaccgacgcccgtacggccgccgacaagtccggccagttgcagggttcggccgcgcaggcccgtctgctgggcatgctggtgcgcatcaccggcgccgcttcggtcatcgccgtaggcaccggctcgctggtggagaccttgcagctcgcccatgcgctggataacaagggcctgctgactgcggtcgattccaccgctcagggcatcgcgctgattcgcaaggcgttcgccgaactgcaggatgagaccgacaccacgttgcgtgcggtgaacgccccggccagcgtgtttctgccgcgcctcaacgccaatgattacgatctgatcgtggtggcgggcgacgccgagaactatgccgccacgttcgcccaggcctcccgtctgctgcgcgcgcacggcgtgatcgtgttcaccgatgtgctggcgttggaggacggtcagggcggcatgattaatccggccgaccgcagcgacaaggccatcgccatgcgtgagctgctcaccaccgtcgaagatgacgaaggtttcgagtccacgcttacccctgacggcacaggcctgctcatcgcctacaaaaagtaactctgcccttggctcccctcggagaggggagccactctatctcgcttacctcacaattgcactgacggccacctccacggcttcgtcggcgtcatcggtcacggtgaccagtttcgggtcgattgccgaaatcatgccgtgctcggccaccggaccgttgagccagtcaaagagcccctgccagtattccttgccgtagagcaccaccggaatattcgccaccttgtgggtctggaccaaggtcagcagctcgaacatctcatccagtgtgccgaagccgcccgggcacacgatcacgccggaggaatacttgacgaacatggttttccgcacaaagaagtaccggaagctcatgccgaggttcacccactggttcaacccctgctcgtgcggcaattcgatgccgagtcccacggatttgccgccagccagtgccgctcccctattcgcggcttccatgatgccgggaccaccgccggtgatgacggcgatgttgcgcttggctatctggctacccatgcgccgggccgccttgtagatcgattcggtgcgctgggtgcgtgcggagccgaaaatagagaccgcaggtccgagctcggcgagcgccccgaaaccgtccacgaattccgattggatgcgcagcacacgccatgggtccatgtgcagccagtcggtgtcctggtcgggtttcagcagattggcggtggtattgtccgagggaatcatctggccgcgtagaatcaccgggccgcgatgataggtgtcgcccagcggcgagacgtcctccaagtcgaccgggttcaccggcgttgcggcagcctcggttgccatctcggcctccaacgttgccgcatcattcgcggctgtggcttccaatggttccatatcgtccacgactgtggacttggatgcggcctcggctagattctttgcttcagcggcctttttgccgtcgttcttcttggatttcttctgcttctttgccatccaatatcctcctgtacggtgctatcgactcttcgcattctagcgcctgaagctctgcatacgttttccgcgaaatcatccttgacttcgtgaagaacgtacggtgagtgacactcagcgtacggttttcacgaaataaggcctcatctcgtgaagaacgtacggtgagcgcgcctcagcgtacgttcttcacgaaacaaggccaacaatggagtagggatcgtccaagccatcagtggcggaagtcaatctccacactggcggtgccgtcggcgagggtgccggggtgttccgtgggcgtggtggactttgtggtgcgaccggtctgaccagcgccatcgccatcaatcgattcgtcatcctccgcatcggccgctgctgcggctgcggccttctcgaatctcttggactgacggctcagcagcacaccggaaatcgcagcggcgatcagggaggccaccagcacgccgaagcgcgcctcagcggaaagttccgcattcttgtacgccagcgaggcgatgaggaaggacacagtgaagccaatgccgcaggcgacggcagcgggaatcatgtcgcgcacgcgcagccccttggccatcttgagcccgcccacatgcgtggccagccatgcggtggtgatgatgcccaaaggtttgccgaccaccaaagccacaatcagtgcgataaccaacggcgaagccagcaacagcgggctcaccgactcgaagtgcacgccggtggcgaacagggcgaagatgggcagggccagcagtgcggagaatggctgaagcttgttggcatagcgttcggcacgcggtgaaagttcgccgtgcatttcacgggagggagtcagcaggccaaccagcacgccggccagtgtgggatgcacgcctgcctcgaacatcatgatccaagcgaggacgccgacgatgccgaccgcaatccacggcacttttttcagtcgtacgaggtatgcccagatggcggcgcacacgatgatgccgatgaaccaataccaggcgttgatcgaggagaagaatacggcgatcagaataatggccagcaagtcatcgacggtggcaagcgtcatcaggaacgcgcggatcgaaccgggcagggccttggcaaacagggcgagcacggccagtgagaacgcgatatccgtggcggtgggtactgcccagccgtgcgacatctccgagaacgggatgctgctgccggtggtggtcagaatcagcgtgccgggttcaccaggcccgatctgagagaacaatgccgtgacggccaggaacaggatgggcggggcgatcatgccgcccaccgcgcacagcatcggcacggcggccgccttcggattggcgagcgagccggtggtgagttcctgcttcagttcgaggcccacggtcaggaagaagatggtaagcagaccatcctgggcccaatggccaatcggcaggtcgagattggtgtaggggatgaacagatgcgtttccgcgacggtctcgaacgcatgcgcggtggcgggcaggttcgcgagcaccaggccggtgagcgcgaagccgagcatgatgagtccggaaatacggtctgaagcggcgattcgcctgatggtggaccagagtcccttcttcgcaccggcggtcgtggccatcgcgtctccttactgtactctcttggatgaaccgtatgtaatagtacggaatatctcaggacgttccgctccgggctgagtcgcgaagggcaaccttaccccacccctgtgtggccgactcaaacgggccaatacaattggaaaagcctcggaagcatttcgctttcgaggcttactgtgcgccagacaggattcgaacctgcgacctgctgatccgtagtcagctgctctaatccgctgggctactggcgcataccactgttgtccccgtggttcgggagtgcgccagacaggattcgaacctgcgacctgctgatccgtagtcagctgctctaatccgctgggctactggcgcatgttgtcttttcagacaactcgatatataatacacgccgttcagatgaatgcaactcggcgtgttgcggcgagtcgcaccatcctaatcgccaccgcaacggcgtatttactggcctcacgccgcatgtgtacggactcggtcaagcaaaaccgactacgcaactttgaggcgtccctgcggcacatccacggcttcgcgcaagagtttgggcgtactggaaccctctacggacgccttgtccacaatcacctgcttcacatcatccaaactcggcaactggaacatcgtgtcctgcaacgtacgttcgataatcgaacgcaacccgcgtgcgccggtcccctgcttgatggcgatatcagcaatcgcccgaatggcctgttcggtgaactgcaggtcgacgccgtcgacggcgaacagcttacggtactgcttgatcagcgcgttggctggctgggtgagaatcgccgtcagatcgtctacggtaagttccttcagcacactggcgaccggcaaacgtccgatgaactcaggcaacagcccgaactcggccagatcatcggcattgacctgttcgagcaattcctcgtctttcatgtcggcgtcgtgccaattcgcgccgaagccggtctctcgacggcccaatcgcttgcgaacaatatccgtcagtcccacgaacgcaccgccgcagatgaataggatgccgcgtgtgtccatctgcgcagtgtcctgctccttatgcttgcgcgtgccctccaacggcacggaggcgatggtgccttccaaaatcttcagcaacgcctgctgaacgccctcaccggacacgtcacgggtgatggaggtgttctcacctgatttgcgcgcgatcttatcgatttcgtcaatgtagatgatgccgtgctgggctcggcttacgtcgccatccgcggcttggagaagacgttggagcacggtttccacatcgtcgcctacatagccggcctcggtcagggtggtggcgtcggtgatgacgaatggcacgttcattacgcgggccaacgcctgtgcaagataggttttgcccacaccggtggggccgagcaacagaatgtttgatttggcgacctcaacgtcagccaaagggtcactgttgcggcgggtagcacgcgtctgggcgggagcggattgcttggcttgtttgccggtctggccaccgtgcccgttattcccgtcaagctgctcagcggactcctgaagctccatattgacgcgtttgtaatgattgtatacggccacggacaatgcgcgcttggcgttctcctgaccgatgacgtagcggttgagataatcgaagatctgagcgggcttgggcaggctcagcgaattgacctcggcatctttgacacgctcctcggagatgatgtccacgcacagggcgatgcattcatcgcagatggaggcgttgggaccggccaccagttttctgacctgacgttcggttttgccgcagaacgtgcaacggggtacgtcctcgttgtagctcaccacacgtcccatgattctcctttgccgaccgcgccgcaccgtcgaaccgccacgctgcgcattatcattgtcatccttgaaatacaatacccccggtcgttgccgaccgagggtattgcaatgttcggaagttttactggcggtgttccagcacctcgtccacgatgccgtatcccttggcttcaggagcggtcaggaaagtgtccacttcgatgtcgcggcgaatcttctcgacatcctggccggtgtgcttggcgagggtctcctccagccattcgcgcatacgcagcatttccttggcctgaatctcgatctccgtggccttgccgaatccttggtcgatggccggctggtggatgagcacacgggcgttcggcagcatcaggcgcttgcccttggtgccggaggccagcagaatggcggcggcggaggcggcctggccgagacacacggtctgcacgtcgggcttgatgtactgcatggtgtcgtagatggcggtcatggccgtcatcgaaccgccgggtgagttgatgtacatcatcacgtcacggttcggatcctgggattcaaggaccagcagctgggccatcacgtcgtcggcggaggcgtcgtccacctgcacgccgaggaagatgatgcgatcctcgaacaggcgggagtaggcgtcctgggtcttcatgccatacggggtcttctccacgaactgcggcatgatgtaacggttggtcggcgcgggctgggctgcgcgggcggcggccggcatgaaaccggctacgccatgacggccggccaagcggtcggcacgggcggcgaactttgcttcttcacttgccatgagtctcactccccctgctggttgttgccgatggtgtccggcgtggtcacgagcttgtccacgaagccatagtcgagggcttcctgggcggtgaaccagtggtcgtattcgttgtcgcggtagatctcctcgagggtgtggccggtctgctcagcggtcagctcgctcatggttttcttcatgtccatgatgagctcggcgttgatgcgcacgtcagtggcggtgccgccgatgccgccggaaggctggtgcatgagcacacgggcgtgcgaggtcaggtaacgcttgcccttggtgccggagctcagcaggaactggcccatggaagcgcacatgcccaggcccacggtcgccacgtcaggctcgatgagctgcatggtgtcgtagatggccatgcctgcggtgatggagccgcccggcgagttgatgtacagccagatgtccttcttcgggtcctcggcggccagcatcagcagctgagcgcagatgcggttggccatatcgtccttgacctcttcacccatccagatgatgcggtctttgagcagacggttgaaaatcgggtcgacggggccggccgggacgtcatcgcccgccatgaccggcaaggtcgcaaaggtattgctcaccttgattctccttctaattactcgaacattgttcagactaccgccttgaagcgactgaaggcggcttttcgcgtgctttttggcgggtagcgtagggatttcgggttattccaaggtgtcgaggacgtcgtcaatgaggaggcgggtctgggaggcggcatcgtcgcccagacgcgggaagcgacgggcggcattggcggggctggcaccggcggctcgcgccacgttggacttgctggcaccatgggccacggctttttccgcgagccgatcgaccagtgaatcggcgacttggcgcatctgttcggccacccataattgggccatatccgcaggcaagtcgtagtcttcggccacatcgctggcggcctcctgaatggcggcccacaacaccatgaatggctttcgatagtagtcaatctgctcagtgagcggctcagcggcaagcgattcaagtgccgcacggacttcggtgttttctgacatagctttctttacctcggctcccctcagtctcactgtgttcgacagctcccctcagagaggggagccagaatatatgcatctacttacttacgactcagcaaccactttgatatcaacgacgacgtggccacggccatgccgactggcacgaagaaggtaatcggcgcttcggtcagctccatcaccaagcacatggccataagcggtgcctgctgtgaggccgaaagcaacgaagccgcaccgatcaaggcacacgcggttaccgaatcagtcggaaacatcagtatccatacgaggccgagcatcgcacccagcgtggaacctaatgcgatgccgggctgcagcacaccgcccgatgcaccggagcgaatggtcatcagcgtcaccagcgccttggcgacaaaggtgagtgccaacacacccagcaacatccagatattggactgggacagcgggaaaccggcgttcatcacggatccagaagagccgctcccaccctgaagcatggcccaaaacgaggccattccagagcccgctcccccgccagaggccgaatcggatacattaccgccgcccgtcagcaagttccatggagaggcggccgctgaagatgccgactgcatggcaccagcagtgccggcggtttcaggaatgaacgtgctgaatccaagttgcgctgcggcacggccgttgcccatcacctgcggcacaacaatcgccaccaaaccggtgatgagaccagccagcggcatctgccacagaatggccttgccggtcggcttgtgcgcttccgcccattgcgaaccttttcggaacaatgcgccgcccactccacatgccgcaccgcagatcagagcgaacagcattaacgttggcgtggattccggttgcatggcggtgatgtcgtagaacaggcaatgccctttgatcgcaaccgccacgaatgcggcaatggcagacacgcccagtccaaacgcaaccttttcgatcgtcacatccaccaacaggatttcgacggcgaagaacatgccggccagcggcgcgtcatagacgcctcctagaccggcaccggcagccactgccaccaccatgcgccggtcgataccatcaacgccctcgatatggaacaggtcgcaaaaacgttgcgcgatcatggcgccgagttcgcgtggggcgacttctcggccgatcgaggcaccggagccgacgatgaaaatctgcaacaccacatgcacaatggtttgccagaaaggcattcgctttcccgccacggccttcttgactgagggcaccacagtcgttttgtgtcgtagcagataccagataatgcccgcgatgccgagtcccacggtcaccgatatcattcggcgtgcagcgggcacgccgaatggaccagacaattctgggccttcgatgtagccgagcagcacatgttcaacgccgtagagcaacagggtcagcagacctgctcccacaccgatgagcacgccgagcacaatggtcgccgcagcgagccaaccaaggcgtttgatagtaaccgttggctgcatgtcaacctccgcacgctatgcaacgagtatgccttgggaactcccctcagtctcgctacgcccgacagctccccccaaaggggagccaaagaaatagtccttttaccagaataggaagagcccggaaccgtgaaacacgattccgggctcaaacaatcacgctaacgcgatgaggctatgctcactcagcgtccttggcgtcatccttggcggacagttcgtcggccacggcggcagcagcggaagcggcctcgacggactcggactcttcgtcctcagcggcctcgcccaggaagccggagaggtccacaacctcgccatcagcggtgaacttgacggcgcgcatgccggcgagcagacccttggaacggccgacttcctgcacagcggagccaagctggccattcttgatgatggcctggatgaagttgttcgggtccatgccgtactgctgggcgatggaagcgaggaagttgaacacgtcggactgggacacctgaacgtccagcttctcggccagagcgtcgagcaccatctgatcgcgcagatccttctccacggtctcctcggcctgagccttctgctccttggtggccttctccgggtccggggtcatgcccttgagctgctcttcgaccatgttggccttgacacccttcggcaccgggatctcgaggccttcctgcagcttggcgatgaaggcatcgcgagcctcggtggcctgacgaccttcggcgtcctgagcggcagccttgcggatgtcagccttgagctcgtccagagtgtcgaactcggaagcttcggaagcgaactcatcgttcagctccggcagttcctcagccttgacggagttgaccttgaccttcacggtggccttctggccctcgtgctcgccggcttccagcgtgccttcgaaggtggtctcctcgccggcggacaggccgtcaagagcctcgtccagaccgtcgagcatggtgttggagccgagctcgtagctcacgccttcctgggagtcgacggtctcgccgtcaatctcagcagtcaggtcgatgttggcgaagtcgcccttggcggccgggcggtccacgccgaccaaggtgccgaagcgctgacgcagggtctcgaggcgcttgtcgacgtcctcatccttgacttccggcttggagatggcgatctcaagaccgtcgatttccggcagttcgatgtcaggacgacgctcgacggtggcggtgaacttcagcttggtctcgtcgttggcggactgcggaacatcctgcacgtcgaactccggctgagccatcggacgaatcttcttctcatccagggccttggagtacagctccgggaccgcgtcgttcacggcctcaccggcgacggcggcgaaaccgatgcgctggtcgatgatcttgccgggaacgtggcccttacggaagccgggaacgttcacctgcttggcgatttccttacgggccgcatccagatacgggttgagctcttccggttcaacagtgacggtgagcttcaccttggtgggctcgaggttacgaacgctgatcttcacgctaatgactcctcaaaagtcgttatttcttacagttctgccgtaaggcaacctctacatgataacgccacttacggacggtgcaatgagtttcacctgccagtttcttgcgccctgctcgatcaggaacgtctcgacgtccacttccaccgggtcttccacccagcacaggttgcgtaggatctgtggcttgatgatcatctcggccggcgtgcgggtgtcttcgccgatgcggttgatcacacgccgtacccgctgcagacggtcataacgctccggatggcgctgttgccacagtcgcatggatcggggcgcgttcaccacaccgttttcgtcctgttcgggggcgggcatggtaggccattgggtgggcttcagggccatggcgcggtcgatggcctgcttccagaccttcggcttgaccgtacgctgaatcggcgcgtaccgctcgaacattttgtcctgctcggtgccggtatgaatgcgcacacgctcgttcagggatcggagtgcgcggaattgggcggcattgtgcggcttgttggtcgcggcctcgatgattgacgaatcggtcaataacaggctgggagcgatgtcgtatcgccgggcgagccggtcgcgctcctcccatagggatttggcgatggccaagcccctcggatcacgactcagctgggtgatgcgcgagatacgcagccaaggaatcggatgaggtttgcgcggggcaaggcccgcaaccaaagcgtgagaaaactcttcagcggcccactcgtccttgcctgtggctttcaggtcacgacgcatcaaggtttcgagttcgataagcacctccacgtcgagcgccgcatagttgcgccagtcgcgcggcagcggacggtaggaccaatcggcggcggaatgctctttggccagcgtgatgccgaggtagtgttcggtgacggcggccagaccgaagcggtgcaggccgagcaatcgcgccgctatttccgtgtcgaacaaggccttgggtttgagtccgatttcggcgaatccgggcaagtccatcagagaatcatgcagaatccatgtagcatcgcccacggcgtcattgaattcattccagtcagctccggcccgtgtcagggcgacgggatcaagcaaggcgatgcccgcaccttcacgtttgaactgaatcagccaatcctcatgtccatagcggaatccggacgcccgttcggcgtcggcggccagcgagcccgtcgcctcggccagcgcatcgcaggcacgatgatagccatccagcgacgaagtgacatcgggcactcccccgcgaggctctttcagcagtcggggttcggtgtcacggacgtcactcaactggcgtcatcctcctcaaaacggatggtggatctgatgaatgcggcccacgagcggatttgtgcgccggcgtccatagtaccgtccggtccggtcccgtcaagcggggtccatgagacgcgaatctcacacccggcgctggtggagccggccatcgaaccaaaagccgtgttttgggtcacggtgactgtgccggataccgaatccggctcgatgccgtcgaaatagtcgcacatgtcatcccagtacatgccgggggtcagagaatcgttttcggcggtttccagcggcagccgcgcgaacgccacgcaacgccagttggaatcccggtcaatgcgcagctcatgagcataaagcatcatgatccagcctgtggcgattcgtgattcggcatcgttgccaagaccggcggaaaaggcatcgccgagggcacgctctcccgcttcgaattccacgccgataccataatcggccaaggtggaaggcacgggaatctcccgatagcgcacgtcatggatgcgcttcatggtgctgacggattcgacagctgcccatacttcatccggcacaccctgagggcgtacggggcgtccatcgttggacgctcccataggaaatgcgtagatgtcggccatatctctagggtatgggcgaaccggccgaatcgtggtatttacgcgcggttcggccctgcaatttaaaacacggtgaagccgtggtccttgaactggttggccacccgcgaacgggtggcggcgttgggtcccttctggttctccagcgggtatgggatgcgcagttcgtgccacttcgggcggccaagctggtggaatcccagcacgtcgatgtgttcgacggcatcaccgaaggactcgcagatcttcgccacgttttcgacgttctcttcggagtcggtcaggcccggcacgagcacaaatcgtacccagatcttcttgccggccttggccagtcgctggccaaaatcgatggtgggctgcaaggtgccgccggtgaccttgtgataggtctcctcgtcgccggatttgacgtcgagcagacacaggtcgatgtcctcgagcatctcgtcggtgtagctcgtgttgaggaagccggacgtgtcgaggcaggtgtgcacgcccatctccttggcggcatggaacacacgcgagacgaaggcgggctgcatcatggattcgccgccggagaaggtgataccgccatgcgtggccttgaacaggtccttgtaacgatcgaccttcttgatcatggcgtcaaggtagacgggcttgccgtcgcgcatcttccaagtgtccgggttctggcagtactggcagcgcagcgggcagccggacatgaacacggtcatgcgggtgcccggtccatccacggaggtgttgatgtcccaagagtggacgaagccgatatcgccggatttcagggcggaaaggcggtcacgtcggtcgagtccgattggggattcaaagccggaaaggccgcccatcaaagtctgcgaggcataggtcttcgattccttgagcatatgcctggtcgtggtgcggaacgtgggtgttgcgggcatagttgtcctcctgttccaaatgatgcgaaagtctgtggaaaataaggaaggggtggagccgtgccccaccccttcagttagtcattgccgcggttcgcggggttggtcatcagtcgacgacggcaccttggtggaaggtacgggagatgacgtcgagctgctgctccttggtgagcttgacgaagttcaccgcgtagccggagacacgcacggtcaggtgcgggtacttttcggggtgctcgacggcgtcctccatggtctcgcggcgcagaacgttgatgttcgcgtggtagaggccgtggccgttgcccgcgtccaggatgccgaccaggttgccgatgcgctcggcttcatcgcggcccaggccatcgggggtgatggtgttggtcagcgagatgccgtcaagagcgtcgttgtagtcgatcttgccgacggagaacatggacggcagcatgccgtgcgagtccatgccgttctccgggttggcgcccggggcgtacggggtgcccttcttgtggcgggacgggaaggaaccggtgttcttgccgtactccacgttggaggtgatggtcaggatggactgggtcgggacggcgccacggtagacgggcaggcgcttgacctggcccatcacggtggagacgacccacttggcgatgtcgtcggcgcggtcgtcgtcgttgccgtagaccgggaactcgccctcggtgcggtagccgacgaccagatcgtcgtcggcgccttcgacgtactcgtactcgtggccttcgaggttcttggcttccttgttggtgatcgggtacaccttggcgtacttgatggcggacagggagtcggcggcgatggacagaccggacatgccgcaaccgagggtgcggtacacctccttgtcgtgtagggccatctcgatggactcgtaggcgtacttatcgtgcatgtagtggatgatgttcagcgcttcgacgtaggtttcggacagccactcgagcgccttctcgtagttgttcttgaccttctcgtagtccaaggtgccgtcggcctccggggcgatcgggtcgatgacgcccttgtcgatgacctgcatgccggtcatctcatcgcggccgccgttgatggcgtacagcagggccttggcggagttcacgcgagcggcgaagaactgcatctgcttgcccacgcgcatcggggagacgcagcatgcgatggcggcgtcgtcgccccagtgggaacggatttccttgtcggactcgtactggatggccgaggtgtcgatggagatcttggcgcagaagcgcttgtagccttccggcagcttcggatcccagaagatggtgatgttcggctcagggccaggtccgaggtgctcaagggtcagggtgttgagcagacggaaggaggtcttggtgaccatcggacggccatcgtcgccgaagccggcgtcggaccaggtcgcccagtacgggtcgccggagaagatgttgtcgtagtccttggtgcgcaggaagcggacgatacgcagcttcatgacgatgttgtcgatgagctcctgggcgtcggtctcggtgatcttgccggcctcgaggtcgcgctcgatgaagcagtcgaggaaggcggagttacggccgaaggacatggcggcgccgtcctgggacttgatggaggccaggtagcccatgtaggtccactgcacggcttcctgggcggtctgagcagggcgggacaggtccaggccgtactcgttgccgaggttgatgagctgcttcagagccttgatctgctcgtcgtgctcctcgcggaagcggatccagtgctcgatctccggctcggtgaagtcgttgcggtacgggatggagtccttgtcgcgcttcttgaaggcgatcagcttgttgacaccgtacagggcaacacgacggtagtcgccgatgatgcggccacggccgtaggcatccggcagaccggtgaggatcttgttgtggcgggcgaccttgatgttcttggtgtagacgccgaacacgccgtcattgtgggtcttgcggtacttggtgaagatcttcttgatctccggatccggctccttgccggcttccttgatggcctgctcgaccatacgccagccgccgttcggcatcatggcgcgcttgcagggcacgtcggtctgcaagccgacgatcacgttgtcgacttccggggagtcgatgtagccggccgggaaggcatcgatgccagccggggtgtgggtgtccacgtcgtagacgcgctgcttgcgctccacggccaggtagttgtcgtcgaggtacttccacaggtgcttggtcttctcggtggcaggagccaggaatgtctcgtcgccctcgtacggggtgtagttcttctggatgaagtcgcggacgtcaatatccttctgccagttgccctcggtgaagccggcccacgccttggcgtcgagctcctcttgggagacagctgcattttctactgcggtcatgtcactccttaaatggggttgtaggtttcgcatcttcacggaacccttggttcaacagtgtagttggcacttgcttgggaaaagccgaaattgggagtgagctatctcacattgttttttgtgaacgctaccattccaatggtttctaggtattgatggggctattgcacgtctccagatatgggaaaccgctcatactgtgatgttcgtatgagcggcttggtgagcggttcggtcttgagattgacagcagaaccgtatccgtctgttttggccgtcagtcttcatcgttcgcttgcgcggatttcacaccgtagttcttccagcgccagttctcctcctcccatctggcgttgcggtccaccacgatgtcccaggcgtgttcggcatcttccttggtcttgtacggacccatgcgctgttcaatcggtgagaccatgcccagctcggcctgcttcttgacggtgttgaaataccactgcttcttgttatcgtctgtcattggtacctcctcaacggtattacttgctcccgctggcgggagcaatatatgtttattccctgaacgcgttggtgacgggcagtcggcggtcgcggccgaacgcgagggccgtgaccttcggtcccaacgggtattggcggcgcttccattcggcgcggtccaccaatcgcatcacagtgtccacggtggcctggtcgaagccgtcggccaacaggtcggcgcggccgtgcgcgtgctcgatgtatgcggcgagcaccttgtcgagcagcgcatattcgggcagggagtcggagtccttctgcccggggcgcaactcggccgagggagccttctcgatggatgagaccggaatcatcacgccgttcttcaacgggatgccggcgttgccgtcctcgttgcccacgatcttgagcccgccgataccgacgcctgcggccgcggccttgttacgccaacggctgatctcccagacacgggtcttgagcaggtccttgatgggtgcgtagccgccgaccgcatcgccgtagatggttgagtagccgcaggcgagctctgacttgttgccggtggccacggcgagcaggccgcgagaattggaactggccatcacgatcacaccgcggatgcgggcctgcaggttctcggcggagacgccatcaaggtcaagttgctgttggtaggcgttgaacaatagctcaataggctggacctcgtaatgggcaccgatgttggaggccaggtcagcggcgtcgtctttggaaccatcggaggagtacatggagggcatggagatgccccagacgttctcgccgccgcatgcgtcggccgccatggcggctaccagtgcggagtcgatgcctcctgagaggcccagcgtcacgccggtgaagtggttcttggccatgtagtccttgaggccgagcacgcaggcagtgtatacctcttcgtccgggtcgagttccggaacgatctcggccttgacctgatgttcggcggtggaatcgaagtcccagaacgtcaggttttccatgaacatcgggcctcgttcgataagcgtgccgtcggcatcgaccacgaagctgccaccgtcgaagaccaggtcgtcctgaccgccgacctgattcaggtagatgaccggggcgttgacttcggcggcacgacgctgggcgagctcgaaacgggtgttggtcttgccttcctcatacggcgagccgttgatggtgagcagcaggtcgatgttcttggtggccaggtcggccaccgggccaccatcctgccagatgtcctcgcagatggccacgccgatggtggcaccatccacgtcgagggtcacggaacggtcgccggcggagaagatacggaattcgtcgaacacgccgtagttgggcaggaagtgcttgtcgtagccggcccagaccacgccctgatgcaataccaccagtcggttgcgcggcttggaggtcttacgatcagtgcccacggtgccaaccaccacgaacagattgccgaggccgtcgtcgttgagctgggcggcgagttcgttggccttgtcccatgcggcttggcggaaggtgcggcgcagggccagatcttcgatggggtatccggtgagggtcatttccgggaaaacaaccacttgggcattccctgcggcggctttacgggagtagtcgagcactttggcggcgttggcatcgagcgcgccgacgcaggtgtcgatctgggcgagtgcgaagcgaagctgtgtcatagcttcttagtgtagccgcgtatggcgtcggattgcctgttcttccggcttggcgtcattcattaggtcgtttttgcgttcattaggtcactgcaatgcgatatcagtcgttgcaatggcgcgattccaacaaccagtatcgccgttcaccgacctaatggacgatgaatcgacctaatgaacgaatgccactcccctcagtcagcttcgctgatagctcgtcctgcacttatggacgggcgaggcccgcgcatatctggttcggctgtcgcctcactttcggctgcagacagcccattgggctgtctgcctaacgcctcagcctccagaggggagccaaaaaaggatttacctcagctcgttgagcacgcgcagggcggcgttgacgtagaagttgacgaaggtgggaatggattcgtcgagacccacgaaatgcgggctatgccagtcggcgcaaccttcctggccgtttgacccgacgaacgcgaacaccggcaacgtcaccttggcgaattcgcagaagtcctcccccgccatcgactgacgtatcggttcgagctgcgcgtagtcgttgacatccgccgccacggccttggcaagacctggatcggagaccagcgggtcttggaaatcatcccagaccacatcggcgctgataccgtatgcctcggcggtgtgttccaccacttccttgaatcggcggccgaccagattgccatccgacttgtggaaatagcgcacagtcccttggaatccggcttcggcgggcaccacgttccacacatggccgccgtgcacttcggtaacggacagcaccagcgggtggaagggcgtgacgttgcggctcacgatggtctgcaggctcagaataatactggcgagcgcttcgatgggcccggtgcccttgtacgggtagccggcgtgggtgccttgggcgtggagggtcacgcggaatttcacgcagccggccatcatcggctcgacgccgatggccagctggccggacgcatagttggggttgttgtgcgtgccgataatggcttcgacgtcatccacgagtccggcgtcgatcatggcgcgagcgccttggccggtctcctcactcggctggaacagaatcttgattgagccggcgaacttgtcacggtgctcggcgagccagaaggcggcaccgagcagaccggtcatgtgcaggtcgtggccgcagccgtgcatcacgccttcattgacggagctgaactccagtccggagtcttccacgatgggcaggccgtcgatgtcggcgcgcagcccgatacgcggcccgggaccggcctcgccctgaatgagccccacaacaccagtctccagcgggttgtgcaggatctcgatgccgtgcgccttgagctggtcggtcagatagatgctggtgtcgaattcacggaaactacgctccggatgggcgtgcaggtagtggcggatggtgatgagttcgtggtcgatgtcgatatgttcactcatggttcccgattctagtagcgcgaagaatatattgcggccctcgcttcatattggcgagggccgcgatctatggggtcagtatgccttgttattgctggcgtttgagcagtcgtttggcgatggcgttggcgatgccctgcaccacctggaccagtacgatcatgatgatcacggccgtccaggtgacggtctggtcgaacttctggtagccgtaggcgatggcgaagttaccgagaccgccaccgccgatgtagccggccatggcagacatgtcaagcacgccgatgaacaggaaggcgtaggccaggatcagcggtgccagggcttcggggatgagtacggtgcggatgatggtgagcttgccggcacccatcgaacgcgcggcctcgattactcccgggtcgaccggcacgagattctgttcgaccagacgagaagtggcgaaggtgcacatgaccaccatcgggaagatggcggccacggtgccgatggacgtgccgaccacgacgatggtgagcggctgcatggctgccaagaaaatgatgaacggaatcgggcgcacgatgttgacgatgatgtcaaggatgcggtagacgaccgcgttctcgaacaggttgccggggcgggtgccatagagcaccacgccgaggatcaggccgaggaatccgccgatgacaagggtgacgagcaccatggtcagggtctggccgatggattcgaacaatagtgggcgcagcacgttccagtcgctacgcgagttggcgaggatgatcatgcgttgtctccttcatgtgcggcggcggatacagcgggcgcggtggcagtatcggccgccagtgggtcatgggcgcggtcttcggcgtaggaggcatgtccggcaactgcgtcggcgtaagccacgggctttgcggcggtgccgaagtcaatgacgtcgctattggcggcgagctcgcgcaggaattcgtccacgtgccagccgggcccgttgaattcgtaggtgatggcaccgatggcggtccccttgaccgtgtcgatgccgccgtagagcaggctggattcgacgccgtatttggcgatgagttcggagatgttctgtccggatgccttgagttcgtggccatggctgccggaaacgtccttttggcggatgagcacggtgacgatgcggcccgaccattcgtggtgcaatcgctcgacccggtcttcctcgggcaggccggacagggcggtggcgatgaatcgcttggtcaccggctgctggggcgcggcgaacacgtcgtatacgtcgccggattcgaccacgcgtccggcgctcattacggccacgcggccggcaatctgctggaccacgttcatctgatgggtgataagcacaatggtgatgccgaattcctcgttcacacgcttgagcaaggccagcacttcggtggtggtttccgggtcgagcgcgctggtggcttcgtcggcgagcagaatctccggattagtggccagtgcgcgggcgatgccgacgcgctgcttctggccgccggacagctgcgaggggtatttgtttgcgtgctcactaaggcccacgaattcgagaagttcgttgacgcgacgatcctgatagtccttgcgccagtgatcgagttgcagcgggtaggcgatgttctgcgccacggttttggtggagaacaggttgaactgctggaaaatcatgccgattttctggcggatgggccgcagcttggtctcactcaaagaggtgatatcggtgccgagcacggtcacggtgccggaggtgggtcgttcgagcgcgttgataagccggaccagtgtggatttgcctgcaccggaatagccgatgatgccgaagatgtcgccgcgatcgatggtcaggctgacgtcatccacggctcgtgcgatgttcgcgccgcgtccgcgtgttttgaattccttcacgacatggtcgaaggtgatgatggggtcgctcatagtgctccctgatgctggttgttgatgtccggtcacggaagcggagcgaatcccgattgttggctcgggtactcgctccgcttggtggtaatggctatggacaggttagtcgtgcactcgtatcagccacggctcactgctgggctttggcgtccttctcaatgtcggacaggaagccttgcagctcgctggcgctgaacttgtcggcgaacaccgcggtaccgccggagttctcctgcagggcgtcgagcacatccttctgctggtagatggaaacgagcttcttgtaggtctcgttgttcacgtccgccttgcgggccacccacacgttgatgtaggggcgagcttcttcggattcggcgtcatcctggtagatggcgtccttcgggttgagaccggcgtcggccacgtagtcgttgttgatcacaccagcggcgatggtcgggtccttcagggtggtggccacctgttcggccttgagcggggtgaccttgaccttgctcttggcttcgtcgatgtcggccggagtggagaaggcggtccagtcgcccttgagcgtcacgagaccggcggccttgagcacgccgatagcgcgggcctggttggtttcgtcgttcggaatggtgacggtgtcgccctgcttcaggtccttgatgtccttgaccttggtggagtacacgccgagcgggtagatggcggtgccgccgatgggctgcaggtccttcttgttgctcacgttgtagttggccaagtagagcaggtgctggaattcgttgaggtccagctcgccggagtcaagggccgggttttcggaggtgtagtcctggaagtcgacgatgtcgacgtagatgccggccttctcggcgtcctgcttgaacttgacccattcggggttggtagcgccgaccacgccgatcttgaccgggttgcccttgctgcccttggcggacgactcgttggcaccggcaaacgcgcggtagccgaagaacgcggccacggcgataatcgccacgaccacgatggtgatgatgacgttgcggacggtgtggttcacacgcaccggctcgttattgttaggagcggccggagttgccgactgggttgctgctgtcattggatttcctctctccaaaattgatgtcgggtaacaccataacgcgcttgaaccgcgaaagtgacggaaaatggccgattgccgtataggtgtcttttatggcgcgcatgcaatggccgggattcgtgcgtttgataacccgctataggcgtgccgaacacgccggaaagcacgtcgagaggggctttgacaatggaagctatgactaccgatactgccaatgccgatatccgagccgtattcttcgatatcgatggcacgctcaccagtttcacgacccatacggtgccggattccacaatcgaggcgattcaccggctgcaggccgcaggcgtcaaggtgctgatttgcacgggccgcgcgccttcacagatgcacgtggtgctggataccatgccggtgacgttcgatggcgtggtggcgttcaatgggcagtattgctttgatgacaccggcttctttgcctcgcaggccttggatactgctgatattgaggtgattctcgactggctggaccgtcaccccgatgtggtgtgcaatttcggcgagaaggattacgtgtacttcaaccagtccaatgatctgcttcgcgccacgtggagcaaactgggcaaaaccgcaccgacccggtattttgaggacccgcgcacccgcgcgctggatcatgagactttccagatcagtccctttgtcggacccgagttggaggccgaactggtgggactgtgcagcaatgtgcgcggggtgcgttggcatccggatttcacggatctgattccggccgatggtggcaagccgcgcggcatccagcggttcatggcgcattacggcatcacgcgcgggcagaccatggccttcggcgatggcggcaatgacacggatatgctcgcctacgccggcatcggggtcgcgatgggcaatgcgaccgccgagccaaaggccgccgccgattacatcaccgacgacgtggaccacgacggtgtgcgcaatgccctactgcatttcggggtgctacgcgattattgatgccgtagcgcctcgaccgggtcgagctttgccgcgcgtctagctggatagtagccgaaaatcacgccgacagcgatgcagatgcccactgccagtccgatggactgcacggaaactgctggcgcgatactcatgccaccggcgatgccggacaccaatccagcggcgcccaacgacagcaagtagccgatcaacgtgccgataagacctccaagcactgtgattgcaatggattcggcgaggaactgcgcggtcacgtcacgccgagtggcacccaatgcccggcgcaggccaatttcgcggatgcgttcggtaacgttggtgagcatcatgttcataatgccgatgccgcccaccagcaacgagaccccggccaccgaacccgccagcacctggaatgcgctcatgaagctggaaagctggtcgatggaggattgggcgcttacgaccgacagattctggtcgatctgttcggttgggatacgcatgatgcgagcgacaacggtcttcgtctgttccgtgagctggtcgatatcaaccccgtccttggccagtccgtagatctgcatgtatcccatgttcgaggacgcaaaccgcagcgccacagtggtggcaggcatatagatattcacgctgtcgccgcccatgccgcccatcaatccagacgactcgaccacacccacaacggttgcttcattgccgtcaagcgtgacggttctgccgatggcgtcaatgtccgcgctgccgaacagcttctgcacgccctgcccgtcgagaatcaccaccattgcaccactcgttgcttcactcgatgtgaaggcccgtccacgaccaatcgtcactccggatacatcgaagaaatgctcgtcgacaccggtgatgctcgccgacaccttgtcggtggtaccgggcgcggcgattgacgaggcggcaccatagttcgtcggcgagaagtactcgtagtcggtcagttcctcgcgcatcgcagtgatctgttcgtcgtcaagggtgccgacgtccgtgtaaatcgaaatcgtgcgcgccgcgttcatacccagttcaccgaccagagagtctcgaatgccaccgatcagtgaggtcatggtaatcaccgcggcaatgccgatgacgatgccgagaatggtcagtgcgcttttgcctttgttcgccctcagtgcagagccggtttccgccagcagatcccgtgttctcatcggtacatcccttcacgcagtacgccgtcacgcatgtgcaggcatcggtcggcgcgttcggccacttcggggctgtgggtgatgagcacgatggttttgccttgctgcttgagctgttcgaacgtgtgcatcaccgcatcgccggttttggagtccaggttgccggtcggctcgtcgccgagaatcagcggcgggtcctgtaccaacgctctggcgatggccacgcgctgcatctgaccaccggagagttcattggttttgcggtcgaacagttccggactcaacgccactgattggagtgctttgatggcacgcccttcccgttcacgcaccgggcagtcggaataggccaggggcagcatcacgttgcgcagcacgctagtgcgcggcagcagattgaaggattggaacacgaagccgatgagccacccgcgcagttcggagcgttcgtcatcactcagattctgcacgtccatgccgcacaggcggtaggtgccggatgatgggcggtcgagcaggcccagcgtgttcatcagcgtggatttgccggaaccggatggtcccatgatggcgaggaactcgccttgacgcacgttcatggtgatgcctttgagcacatgggtgtaggtgtcgcctgtctcgaagatgcggttgatgttttcaacctcgatgacgttggctgtggcggtgggcacggcaatggtctcattacgccgtttgccgcgatttgcccggctcgcgtcggaacgaaacgggaacatatcagcgtgccctttcgtccgaagccgcggtttgcgaggtggaagaagcagcatcgccagtattgtcggcagccgaagcgccatcaagcatgatgacatcgcccttgctcacattgccttccacaacggctttggtgttgttcttggctttgaccgtgactcgcacccgcttgaactcatgggtttcggcgttggtctcgagcatgaccgcgctgctctccttaccctcatccacgatggcggcgagcggcaccatcaaagcgttgtcaatgctctgcatggtgattttcacactggccgtcatgcccggcttcagtttcggatcaggggcgggaatgatgagacgcacggcgtatcccacgccgccattgccactctgcccgcctgccgaggaatcagccaactgcgacgtggtgctggcgatggtatccaccttggcatcgagcgtcagtcccggcaccgcggagaacgtgactttggcgctctggtccttggccactttagcgatatccagctcattgatgttgacattgaccttcatctgactcaggtcggcgatctgacacaatggtttaccgtctgcgccggcggaagtggatgagccatcggaggaagctccgatggcggcaccgggcaccgcgctcatggtcagcaccgtgcccgagaccggagcagtgaccgtacgcttattggcttgggcgaccgcctcgtcataggtggcttgtgcttgctgaacggcgacctgcgcgctctacacgccgctttgtgcagcgggcagctgtccggccgcatcatcggcagcggcttggccttcctcaccatcctgattacgtgcctgacctatggtcgcattgatttggttcacctgctgctgggcggcattaaggtttgagttcgctgctcgcagagccagatcggcctgattcacgtcgctatcgagcttgtcgttgttgatggtaaacagtacgtcgccggcgttgacggttgcgccttcctgcaccttgacttcgccgatggtgccgtcgatctgcggggcgacgacggtggagttgatgggttctatggaaccggtggagctgacttggtcgacgaaatggccacgttccaccgttgccgtggatactggagacacgcccccatctgacggggtaataatcgcgtgcaccaccataaagccgataatcagtaccgccacgacggcgacggcgatgatgcgatgcaccacgcgctttttcttgcgcgtctcacgttcgcgcattaatcggttgaattcggcgacttccgcgttctccgcctcgccttgggcaagggcgtcgacacttgattccacggtgtcggtagcgtccaacggttgtatgattgcggtctgctgctgatccttctgcatgtgctctcccccatggctggctccgagcctcgtgcccggatactggttccaagcctatggaggaatggcgtggtttccatcatgcgcaggattgaattgatggggagttgtcatccttaaggattagttggggtggggaatttatgggctgttttcagtcttggctctcgccttcgcttccgcttttctctcccccagtcatgcttcgcatgacagcctcctcgtcagagggggcttatgaataagcaaagggctcgggatgaaaatcccgagccctttggcgttagcgaactaacaacaccgtggaggtgttatcactcgttgtcgccagcggtagcggcggtagcggtgacggcacccttcttgtcggtgttcacgccggagtacacccagtcggtgtagtccgggtggtcgtagcccttgtcgacggcgaactggaaggcctcatcacggaacttctcgagctcgtcgatcttgtcggcgtacttgtcggcgtcgatcatgcgcagggcctcagcggtcagctcgtagcggtcgatgcggttgacacgaaccatgtcgtacggggtggtggtggagccctcctcctcgtagccgtggacgttgaagttgtcgtggttcggacggtcgtagatcaggccgcgcacgtcgtgagcgtaggagtggtacgcgaacagcaccggcttgtcggcggtgaagatgtcggcgaactcctcgtcggtcagagcctcgtcgttctccttggcggactgcagggagagcaggtcggcaacgttcacaaccttgaacttgacgcccagttccttcagcttgtcggaagcagccatgatctcctgagtcggaacatcgccggcggcggcaagcacgacctcggcctcatcgttgttcttggcggtggaagcccaatcccaagcggcggcacccttctcgagctcggcacgagcctcgtccagggtcagccaggtggcagcaggctgcttgccggcgatgatggcgttgatcttgttggtggacttgtagcacttctcggcgatggccagcagcatgttcgcatcggtggcgaagtagatgccgatgacgtggtcattgtggaagcacttgttcagcaggacggaggtgacacccgggtcctggtgggagaagccgttgtggtcctgacgccaaacgtgggaggagaccagcaggttcatggaggcgatcggcttgcgccacggaatctcgcggacggtagcctcaagccacttggcgtgctggttcagcatggagtcgatcacgtggacgaaggactcgtaggagctccagatgccgtgacgaccggtcagcaggtaggcctcgaggaagccttccatctggtgctcggacagctgctcaacgacctggccggagacgtgcatgtgctcgtcgacctcgtcggagatgtagccggcatcccactgcttgttggtgacttcgtaggaagcctgcagacggttggaagcggtctcatccggtccgaagatgcggaagtcgcgcgggttgttcttgatgatgtcgcgagtgtagacacccagacgacgggtggcctcgagctggccccagccgtggccgtactcagccacttccttgacctcgtagtcttcaaggttcggcagcttcaggtcgtcgcggatcacaccaccgttggcgttcgggttggcaccgatacgcagctcgcccttcggcatgaaggcaaggacgtcgtccttgacagcgccgttggcgtcgaacagctcttccggcttgtaggactcgagccagttcttgaggacctcgaagtgggcctcggtgtcgcgggcggaagccagcggcacctggtgagcgcgccaggagccctcggtcttcttgccgtcgatgtacttcgggcaggtccagcccttcggggtgcggaagatcagcatcgggtagaacggacggtgcacgttgtcggtctgagcggcggccttgatgtcgcagatctcgtcccagatggtctcccacagctcggcgaagcggcggtggatggacatgtggtcctcatcatcgaagccagcgacgaactcgtagggctcgtaacccatgccgtggaagaactcgtggagctcttcgtcggagatgcgggacaggatggtcgggttggcgatcttgtagccgttgaggtgcaggatcggcagcacgataccgtcggtgcgcgggttcacgagcttgttggactgccaaccggtagccagcgggccggtctcggcctcgccgtcgccgacgatggccgggacgaacaggctcgggttgtccatgatggcaccgtaagcgtgggacagagcgtaacccagctcaccaccctcgtggatggagcccggggtctccggagcgaagtgggacggaataccgcccgggtaagagaactgacggaagaacttctgcagaccagcttcgtccttggtgatcttcgggaaggtctcagtgtaggtgccgtccaggtaggactgggaggtaccggccgggccaccgtggcccgggcccatgatgatcacggtgttctggccgtggtcagcaatgaaacggttgatgtggccgatgaggaagttcaggccaggggtagtgccccagtggcccaccagacggtgcttcacatcttcgcgggtgaagggctccttcatcagcgggttggaacgcagataaatctggccgatggaaaggtagttggcaacgcgccagtacttgtcaacgccttcgagggcttcctcggaaaccggagcgttgagcttcttccaaggggtgccaataacaggactcgtcatgtgtactcctgtactcctgcacgtgatcgtgcgattgattatttctgttcggtcacggttcctgacccttgcggtgccaaggttttccgttcccaatcaatcgtcatggtacgaggacaacgcgacttttgaacgatttcttgcgggtgtgttcgaaattgttgcggaaatttcagtatttgtgcggttcacctgaccgtttgtcaacattagttttttcaacatactttttcagaacggcggaagcatgcggaaatctagcatctggctagaacagcgcacgttcgatttcccatgttcgaaatcggcgtgttgtccgactacaggcatgtagtttgttcgatttgcgcacatagtccctgcgtgtcggccttgtcgccttgaccagtgataatcaggggtgttcagcccacgtaaaattccaatgaacgttaggggaatatcaatggcaaacggtcctgtgcttgtcgtcgacttcggcgcccagtacgcccagctcatcgcccgccgcgtgcgcgaagcaggcgtgtactccgagctggtccctcattccatgccggtcgacgagatcctggccaaggatccgaaggcgattattctgtccggcggcccggcctccgtgttcgagcccggcgcgccgaccatagatactaaggtattcgaatccggtgttccggtgcttggtatctgctacggcttccaggtcatggcctatgagctcggcggcaaggtggataaggccgctctcggcgaatacggcaagacctcagccaccatcgacgacgccgacggcatcctcgccgactcccccgccgagcagaccacgtggatgagccacggtgtggcggtcgaacaggccccggccggcttcgaagtgctggcccacaccgaaggcgcgcccgtggccgccatggcggacgaatcccgcaagctctacggtgtgcagtggcacccggaagtcaagcactccccgcttggccagaagcttatcgaaaacttcctgcaccgttgcgccgcgctgcccaacgactgggacgcctcctcgattatcgaggatcaagtcaagaagatccgcgagaaggtcggcgacgccgaggtgatctgcggcctgtccggcggcgtggactccgccgtggccgccgctctggtgcacaaggccatcggtgaccagctcacctgcgtgttcgtggaccacggcctgctgcgcaagggcgaggtcgagcaggtcaagcacgacttcgttgccgccaccggcatcaagctcatcaccgtggacgcggccgacgacttccttgaggccctgaagggagtctccgagccggagcgcaagcgcaagatcatcggtgagaagttcatccgcacgttcgagaaggcccagcgccaagtgcttgaagaggccggcgcgcgcggcaaggaagtcaagttcctcgtgcagggcaccctctaccccgacgtcgtcgaatccggcggcggcgacggtgccgccaacatcaagtctcaccacaacgtcggcggcctgcccaaggacatcaagttccagctcatcgaaccgctgcgcactctgttcaaggatgaggtgcgcgccatcggcaccgagctcggtctgcccgacgaaatcgtctggcgtcagcctttcccgggcccgggtctgggcatccgcatcatcggcgagatcaccaaggagcgcctcgacctgctgcgcgaggccgacgccatcgcccgcgaggagctctccaaggccggtctcgaccgtgacatctggcagtgcccggtcgtgctgctcgccgacgttcactcggtgggcgtccagggcgacgagcgcacctacggctcccccatcgtgctgcgtccggtgagctcggaggacgccatgaccgccgactggtctcgcgtgccctacgacgtgctcgccacgatctccacgcgcatcaccaacgaatgccgacagatcaaccgcgtcgttctcgactgcacgtccaagccgccggccacaattgaatgggagtaattgctctctgtgacgaatgggattctccatcggggaatcccatttttgttgccgacgatgcccggtataattttttcgcttacgacgtcgtccggaaagggatgccgacctctttgcgccagggattcgacaacgaaaaatacatcgaactgcaagccgccaacatctcaacagcgtgaaccgacgcttgcactcggatgaaacgctgattgcattgtcaatcaccagcgccaccagtcctgtggccgctcgcgtcatcgacgggctcaaacagttgcagggctgcgacgcctttttctccgttatcatctcatccacggacgaggcgttgtatcgcaaactcggcatcaacgtgtgctgcgaaccgaagtacgaacgggtgagtctgtatcaccggtaaacgccaccgataagcgcggtatgccgcgaatcgtcaagccggtaatcatgcagcatgcggcctgacgattcgctgctgtcgcattgtctctcccctcgaccatgctgggcttgttttccgtttgttggagagaacgggggatgccatcagcactacggtgagagaaggattatccgtgaa

SEQ ID NO: 3105 - DNA, 24943 bp, Unknown
  R215_18m  MAG No. k141_8561
cggtggcttgtggctggtgtggggcgcggtgacattcggtggtggtttgaaggatcataacgggccgcagacgcagtcgggcctgtggcagatcgtgggcggcggcatgattatcgcggcggcgcagatcttcagcgccgtggcgatgggctgagccggtttgaggcatcggggatcccggcatggaggatttcatcgttgcgatgctcaacatgatcgggggcggtggcgccggttcgatagccactggcatgctgtcgcaggggccggagacgtggaatccggcgctttaccagttggccgtgaacgtgcatgacgtggcggtcaagccgttgacctcggtggttctggcggtggtgttcaccttggagttggcgcgtaattccacgcgcatcgagtccggccgcgagttgggcgtgaagatcgtggcgggcacgttgttcaaggtcgcgctggtgttcctggcggttcagaacgcgggattgttcctgcgtgcgttcgattcggccacccagttcctcatgcagggcgcttcctcgcaactgtcgttcgatgcgtccggcgagggcggacagttgggagacctgatgcgggagcaggtcgaggatgccggcatgatggggcaggcggccttgtttttcctgctggcgattccgtggctggtctcgcagctcgcggcggtggtgttcaccgtggtgctatacatcaggttcatcgaattgtatgccctgaccgcgttccagtcgttgccgttcgccttgctggtgcatgaggacaccaagccggtgggcgtgggctatttcaaggcctatgcgcgcacgtcgctcaacgcggtgtgcgtgttcgtgtgtctggtgttctatcagcgcatcgtgatcgacgcggtgcgtctgcccgagggcgacgggtcggggatggtgtcgtgggtgacgggcaatttcggcaatctgctgatggcgggcattctgttgtttttcgtgatcgcggtctcccaacgtgtcagccggacgatcgcgggcggcgagtgagcatgacggggattcaaggaggagcttgatggcgttgcagatgcgcgtgtatgcggagatcgccagcgtggaggcgaaggtcatgtggggcatgggatggcggcagttggtcgcctcggcgctcatgcttgttctgggaggcggcgaggtcgccgtgttcttcctgctgctggagcagcccgatctgggctcgtacttgttgttcgtggtgtgtctgccgccggcgttgtggggctggtggcgtcccaagggcctgaagccggaacgctatctgggttacatgatccgccagcgcttcggcaggaacatccacacactggagaatctggagccggccaggtggccggcgaaaccgtcgttgagggaacgcgccctccgcaggggcgcgggaaggagcgggcgtggccgttgagagcaaggaacgcgagtatggcaggcgtatgaaaaggaaaggcggcgggtccgccaaggtcgcgcggtcgagcagggagttggtcgcctatgattcgatgctgcccggtggcgtcgcctatctggggcaggaccgttggagcgtgacgctgcgcatcagcgacatcagttatcagatcgcctcgcaggacgtgcagatggatgtggtggagcgttggggacggttcctcaactcggtgggcgagggcatgggcatccaggtcacggtgatgacccggacattggacccggaatcggcaggccaagggctggcgatgggcgtcaagggcgatggcctggatgcgttgcgagaggatttcgaccgtcatgtgcgccgcaagctgtcgggccagtcgagcggcaccgtgtgcgacaagtacctgacgctgacccttgcggagcaggacggccagcgggccgtggccacgctcaaccgagcggccttgcgggccatcgcgcaattgcgttccgtgggcggctgccgaggctccaaactcaaccgcgcggaacggctcaaggtgctgcaccgggtgctgcgccccggcgtgcgtttcacattcgacgaggatgcgttctcccggtcgcgcggcctgtgcacgaaggactgcgtggctccgtatgccatcgacacgggcgaccggcgtcgggtcaagctgtgctcgggcacgcgcgaggtgtggcatcaatgcctgatggtgcgcgatttccccgagtggctttccgaccagctggtcgcctccctgacggacatcaaggcagacatcatcgtgagcgtgcatctgcggccccatgcgaaggccgaggggttgcggctggtgaaccgcaagatcgcggagatggacatgcaggccatcgacgagagacgcaggaaccgccgccagcatctgcccgagaacctactgccgcacgatctggaggaaagcatggggcaggccagcgaattgcgccgtgacctggagcataacggcgaccggctcatggacacgctcatggtcatcgacgtagccgccgacactcccgaacggttggcgcaggtcgtgcgcgaggtggaggccacggtggacggccagtcatgcgtggccgaatccctgacctacatgcaggtcgagggattgaacgcggcgctgcccctgggcaatcccttgccgccgatgagacggaccctgaccacgtccagcgcctcgatactcgttcctttcaccagccaggagctgtgccagccgggtggtgtgttccacggcgtcaacgccaggagcggcaacccgctggtcatcgaccgcaccctgggcatgaacggtaacgggttcatcctgggcaccacgggaagcggcaagagccaggccgccaagaacgagatcacgcagacgttcctgctgcgcgagcaggacgatctgatcgtcatcgaccccgagcatgagttcacgcccctgtgcgacaggctcggcggccagcgcatcgagatcggcgaacgctcctccaatcacatcaacgcgctcgacatcgagtactcggacgattccgagggcgttcccattcggggcaaaagcgcgagcgtgctgaacatggtcgaggcgctgatcggcggcgctgacggcatcgacaaggcccagcgcagcctgatcgaccgcgcggtcacgcaactctaccgcgagcaccatgagaagcccgacaggcccgcgccgaccctggtcgatctgacggaacgcttggacgggctgggagagccggaggccgtggatgcggcacgcacgttggagatctatgccaccggcagtctggatgccttcgcgcatcccacgaacgtggacacctcgaaccggctgctggtctacgatgtgtcgggtctgggcgcggaattgaagaccttcggtctgatggtcgtgctcgatcaggtgtggaaccgcgtcgtgcgcaaccgcgccttggggcggcgcacgtggctgtgggtcgatgagttccacctgctgttctccaacccatatgcggccgagacgttcctgcgcatctacaagcgggcgcgcaaatggggcctgtcacccaccggcatcacccagaacatcgaggaactgttgaccaatccggccgcccggctcatgctcgccaacagcgacttcctgctgttgatgaaccagaatcccaccgatgccgacgccctgtgcgatctgctgaaactctcggacgagcagcgtggcttcttcaccggtgtccagcccggacagggcatggccaagtccggcaccgcgttcatccccttcgacggacgactcgacaccggcagcctgctctaccagctgtacaccaccaaattcgaggaccagcatccatgaacaagccccagcccatcggacgggcaagccaaaccgcgcagccctccggcccagcgccccgaaagctgcgggccggccgacccatcgggcttaagggcgaggacgtcccgccgttctccggcaatgccgctcctgccccgaagatcgagggtcagccgtccaagccggcgttggccagaccaagccggtccgatgggccaagccggatagcgctgcgccatctggcgagagcaacggaggagacctccgctttgctgcaagcgcaaatctcaagcgacgacaccgataaggctgatggcgaagccctcggccattctcccgcttccgttgcctcccgagtcatatcgccgcgaggcaagagccggcggcccggcaaagtccgcgtagctcgtcgtggcaacatgcgtggaggccgttccatcctgactcaaagcgcactccggaaacgcacgggccctgttctagccagagacggccgagcacggcgaacagtccgttccggcgccggttcctcgatgcgagcgacgcaatgggtcgttcggactatggcccgttccatgatggcggccaaggcggcggtcatggccacggtgtcggcggccgccggtctgccgttgctggtcgtcggcgcgatcgtcatgctcatgatcagtctgttgatgtggcttatcccgaccgtggccgtgggcggacaatccacctgccaggccagcgtcgtcgaggtgcccgaacaggccaagccctgggtcgaacgggccgcccagtccagtggattgggcgctgatttcatcgccgctctcatgcgccgcgagtccgggttcgaccccgaggcgtatgccgacgacagcaacggaggcacctggggcctgttgcagctcaaccgcagcgtgtggcgtggcgtgcatcccgaaggcgcggaccagaccccgccccaaggcatcaccgatccaaacgtccacgcccaatacggcggcatatatctcaagaaccggctcgaaggcgtcagacagctcaaagccagccatcccgacgcgcaattcgcccggctatccgacctggaggccttggtcatcgcgcacaacgcgggcgaaggcaacctaatgaaatatcccgacattccgaacagcaccaaggaatatctggacgaagtgcggcccgccatcaacgccggcggctcatgctcgaccacggccggagccaccatcggcaacctcagcccgcccctggtcgccgatggcaccagcatcgacatcgacgccagcggcgtgcccgtggcctcgatcaactcgtacagcgtgggccaatgcacctggtgggccgccgcccgacggcaacagatcggcaaaccggtggacccctacatgggccacggctacatgtgggcggccagcgccgagcaacacggataccccaccggcggcaccatccaactgggcgacgtgatgagcttcgagcgaggagtgctgggcgccagcggcgaatacgggcacgtcgccatcgtcgaggaaatccacgaggacggctccatcctcatcagcgaatccggcggcggccaacgccgcgcctgggcacgcctgctgacacgcgagcaagccgagaaccctggcatcacctacatccactgacccacagccctcaccgagaaaggagcggaaagcatgccacgcatcaacccacggctcgatccccacgagctcgcagacctcatggccgcccccgagcactgggacttactcgaccaagttccccggcatccggccgcatggccggatctcgccacatgggccaaactcgcgctcaacgacccctcgacagccggagcaccacccgagccaccgacaggcacaccccgcaaacgaagactccgcgccatccagccgatcctatgggaggaaaagaagcccgaagcggacgaatcggataaatcgggcaattccaccgcctctgattcctcgacaatcgcggaatccgagacccctgaccagaacgcggcatcctcttctgcctccaacatgtcggaggcagaagaaatattcaccggcgattcgacggcggacgaaaccgaggagccacccatcagggtgcgtcggcgcgtcccgtgggcacgcatcctggccctgaccgccttcaccatcctgactggcgtcctggcatcggtgaccatcatcgcagggcaacgccatgcccatgcgcaggccctcgcatcatgcaatcaagcaatccaacaagcaaacaagctatacgaccaatggaacgcagccctggacgacgccaagccactgctggcattgggcgacaccgacgcgaccgataccgaggcactggtctccctacgcaacgtggtagaacatcacgcgacgaacgaaattcctcactgctcaacggatctttccacggcgcatctcgaagagaacgcccacactgcggacgagcgcaacaagcaaacgaagacagccctcgacgaactctcgaaggcggccaccgccgtcgaacaatcgcaacaggaacgtagactcaccgatgccgagacgaagctctccgacgccatcacccaagccgaagacctctaccaacgcgccgaggccaacaccgacgttagcgctaacgagacgcgcgtatcgctcggatcccaactcgacgccgcccgcaacaccctgcacaccaccaccgacatcactaccctgaacaaagcagcaggcgacctcaatgccctcacccagcggctctccgacgccatcaaacaagcagaagaaacgccatccgcgccagccgagccttccgggacatccaaatcacagtccgcgcccatccagcggcagccatcaaccaacaccactcactcggcgccagcatctcccgtcatccctcagcccacacctcaaccgtctccctcagccccatcgtgggatgtgccaagcaccgactctccctccaccttccccgacactttatgaaatgattaatcgaagctagtaaacgctgttcaagcgtcgctgctgattgagtcactgacattccagcatcttttgctcaggatggaaacaaatcagagggttcgaacattgtccggtatctgtcggccgacaacgtagtcgcacaaaatgtccgtaaatggtgcgaaaaagataaatatcatatcagctttcatacgtcgtgcctaaactggatgacggttatggtctgtcgtagagatggaaacgattggaacaacggaggtgcgtcatggatcatgctgaactcatgcgtgaaaactccgcgctgattgctttgctcaggacttgcgagaggccagacacttggacttccattgccaacgattgtgtgctcgaaggcagcgcggaacgcttgcttctgcacaagatcgatccctcatcgcatccgctgttgcgtgatgatgccgatggtgacgatatgcagggcacgttgctggatgacgtcggactcagtgctgaacaggtcaggcagctagaggacgctcggaacgaatctgttcagaatcttgaagattggcgtagtcagggctttgatttcgtgtcggtgttcgacacgaggtttcccgaacggttgcgcgccaccatcgacgtaccgccgttcctgtttgccagcggcgatctgaaggccgatgatctgggtgtcagtgtcgtcggttcgcgccattgcactcccgagggtgcgcgcttcgccgtggattgcgctcatatgctggtcgaacgaggactgaccgtcgtcgccggcctggccaagggcatcgacaccttcgcccaccagacagcgttgaacgatggaggccgcactgtggcgttcatcggcaccggcatcgaccggcagtatccggccgagaatcgtgacctgcagcatgagatcgaggaacgagggctggtgctttcgcagttttggcccggcgcccagccgaccaagcagtcgttcccgatgcgcaacgccctgatgtccggttacggcgtcgccacaattatcgcggacgccggcgagcattccggcacacgagcccaagcgcgtcaggcgcagcgtcatggccgccccatcatcatcaaccgcatggtgctcgataaggcccaatgggcccgcgacttggaaaacaggcctggcgtgtacatcgtcgatgacgtggtgggggccagccgggcgctggatcgcatcttctacgtcaacgacaacgtggacgacctcatcgaagccgtactcgccgaggaatccgccactgtatgagcgatttgatgcgcccgagcgcttatcaacgtctggagctggcaaaggccgcgcgcatgggcagttacgcgccctgcgtcatctatagcagcacgcagaaccatgtgtgcccgttatgtggtggtcccaagaacgcttcatacgcattgtgtctggcatgtgatgccgaagcccaacaagctcgcgcgctgcgacccggtggcgtcagtctcgctgataccgtgcggttcggtcattacgcttgtaaaggcgagcagatgtaccgtgtcatgcagggctacaagaatgccaccaatccagcggcagccgaataccagacggatatcaagtacatcgcagccgacgccttggcggtgcactacccctgcataggccggtttaccggcagtatgccgaccgcatgggcaacgattccctccactcaatccagtcgtaattatgggaagcgccatatcctgaccgatttggtcgcaccgttcatggcccattcgaaaatcccgcagcttcatttgaacgcgaacgcagggaaagtgcataaccgtatcaatccgcagattttctcactcgcgccggaatcacaacatctggaccttgcgcatgttctgctgatcgaagattcatgggcaagtggagcgaccgtgcaatccgtcgctgcgatgttgcgccttcacggggcagcatatatcacggtgtactgcatggcccgcattattgatttgtcttggatcgagcgttccctcggcaagaacgtagccgacggataccgccaactgacttatcaaaaccgctgcccctggtcgctggatcatcacttcgtatagggtgtctgttcatgcctcgacggctgaacccctcaaaaagaaaagatgtttaccccgaatctcggtctgttagcttgtagaggaaaaggacatctcacctcgtaacaacacctagttttttagcattggcatggcggaaaactaagttgaattgctttgagtaataagcatataactacatctgcgacagtgctgtccaatccgcttcggcacaccataattctatttgatctttaccaaacaaaaaatttggagcatgctgcagataacgaaggaaagatgaggcatttcttgaataccaaaaacgtgggttagtcgaagatgaagttgctacgtaaccgattcgtgcacgagagatcattactgaaagaactctcgcttcctcatctatagcctcttcacttttagccttatagaacggtatggttccttcttcaagtcctacgataaacacccaatcaaattgctgcccttttccagcgtgcccagttaaacaatgtattcctttgcgcgttgcgatagtttcattgccttttttcgcattaatacatctcttgacttctgctattgaggatgcatcagattgtgctagccgatcaaacaaccatccacatgcatcttcgtgttcttcggataaatttccatgaaaagcggtatacctctttttgatgaaggacattaattcttcaggctctttgcatgactcgactgataattcatcacagatgtttcgcaatatttttgccgtttcaggcctgaataagccatttccccagtcagcatagctaatattatgagatttaagagtgctcttgacggattccgctcggaaagcagttcgggagataattccaattcgatgctcaggacaacgttccaaaattaattgacacattcgaacaacccattccgcttcagcatcctcgcgattgaatgaagcatatgaagagagcccgccgttgccccaatgttccgggaaagcggcgcttagatgctcgctaccagttcgcggagagagtgaattgacggcatcgagaatggcaggcgaagaacggaacgatttaagaagcttaacttgtttttcggtattcttagtaatttcgtgaaatacgaatcttgcgtcgcctccagcgaatgaataaataccctgagcaaggtctcctgcaaacgtaactctatctttgcagagagcttgaacaagacgcagttgttgatgagtcaagtcttgaaattcatcaactagcgccgcaaaaaaatgatttctataaagtttcgcaacattcttattctgcagaatccataaagcagttctgacttgatcatcataggtaataattttttctttaatccgttctttctcgataatctgtgcaagattgccgacctgtccataaattgtttgaatttttgctttcacttctttgtcagttagacattcaagtttgattttttgaagtgcctccctagcctgcatctttacttttctatcgcaattaagggattgcatgaatcttccaatccagtcaaaactcgcaacagtccattcgtcatcaagtccaatcatttccctgtgtgcattaatgattctcgcagacaatccatggaaattgcatactgtgacatgctgccgcatggtttgcaatccaatgtgtttcttaattctctcgctgatattatcctttgcttgatttgtaaaagatacaaccagcagcttcctcccgttccctgcaaaatcataacgattaataagaccctttgcgcgataagcgagagcttccgttttaccgcatcctgccggcgcagtaatcaccatgttcaacggtcgatagttgaaaatcccctgctgctcttgcgtcatgacatactcagtggacgtcattttgaagcacctcgataacgctagaaaccttttctgcggaatctttagtcaaggtttcactagcaattacagcacaagcaattttatttctcttgtgtctacagaatgatgcaagctgatcttcatctggaatgcttgcatcatcagtaatggcacaagtctgcagcacctctgggctaaacaaactcgactcaccaagtttgtcccatagtttagctgccccgatagcggagacatattcatcttcaaggtcaatccttgagacatatacggctttcgaggcgagattattaacctgaacacctaatgatctcgctgtataagcttcggcatcttcgtcaatcagaacgctaacctgcatgccgaaaccgttctctccaaagatgctcattacgtgaggcatttccttacatccaccggcttcaaggagctctatgccgtctctttccaaatgccgtccggttagctcagcgactttttctactagcattctgtctgattgcccttcaacagcaatgatgcgttttgctgtcaaaagctcaattctactgcttatccaccatcttgctagcgctttttgatctccctgaaggaacccctgacgcggctgtacgggaatgagtccatcccgagttaccactatattgtcaggattaaactcgccagcaacaactccagaatgcgttgcgataactagctgccgccccatgctcaacaaaatacgcatcaaattacgctgggcagatgggtgaagatgagtctctggctcgtcaatggcgatgattccgtctgaattcagcaaattaaatacggcgaaggcaatcaacgcctttgtaccgtctgactgttcagtagcttgtcgtacaactccggatctactctttatttgtaatctcacatcgctcagcagatttccatcaattgctgctccgggaatgaaacggagatcagtagcgtccacgccgcctgccaatgccgggttcaactgcagtgccaaggattttaaagctccatcaaaggcacttgaagtatcaattgcattgcagagcgcgctgatggcttcttctattttcgtcttatcacccgacgcgttaatttccttaagataatcatcgacaatagtcctccgccctgaatttagagacttagctgaaaaatccgatggaattaggttccatctaatacttttgagctgtgatgaactcaatgtgccgttgcctacacctttaggacaataacggctaatcgtaagatcctcgccatcgaagatcgcttccagtcgaattgtcaaagatccgtcggaagcatcaacttcgtctgggaaaaatgagaactcattctcattaagatttgttagctttgcttcaataatgagcggacgttccatgttcctaaaatctgcactgctgatactgtaatacagttgctgcatggttttgcccaatagcagatcaagacatctaattaatgagcttttcccgcttccgttaggccctacgagtatcaggttctctctaacatccagggtgcagtcgattagcctactgtgatttctaacaatcaccgaagatatcttcatcgctcttacaaactcctaatcaaacatgacatctctcagactgtcctaccacactagtatctgagagcaacctctcgtgcatgttgatgaatctttgagcttccctaactactgttcaacggataacctatcagatttgattcgttgatgcacttgcctactgtccgcatatggatagttctccttcctagtccgtcagtttgtggctgaggaagggcggtatgcctcgtagcaggtagatgcattggctggtgtcgaggcggccgagttcgtcgggggtgaggagtttgcgggcgtttttgcggacgctgcggctccaggagccgttcgcgcctttggtttcgctggtttcgatgacgtcgatggtttggtcgccgagccggtcgctgatggttttggtggtggaggcttcgttgccgccgaggaagagccagctgtcgcagttgccggcgatggtctcccagtcgtctcgatacaggcttttgccttgggaaacggtttgcaggatgatcgagcagctgatgccgcgcgagcggatggtggcgacgagtctcacgaagttcgggattttgccgatgttggcgaactcgtcgagcaggcagtgcacatcgcggccgagccggccaccatccgcgtggtcggctttcctgaccagagtctcgaagaggcattggtagaacacgctggccaggaagccgaacgtcgcgttggtgtcgggcagttccagatagaccacgcgcttgccttcatccaaagcctccaagtggatgtcgtcgccggagaggatgcggcgcacctcgcgcacttgcaggggcgcgaggtggacgccggtggtgatgatgatgcttttcttggtttctccggcgcctttgaggaacgtgttgtattgggcgcaggcgaacgccagtccttcgagcatgtcgcgcgtctgctcgtcgtagtcgtcctcgtgggcgcgcatggcggcgatttcgacgcgggtttcggcgaagagggcatcgacgatgaactcgcgctcctcgtcctgttcgctggctcccatctggtcgagcatgtcggtgacgtggttgagcgtgggttcgtcctcggtgtagtggacccatgcgatcagggcggacagcagcgccttttcggcgtcttcccagaagccgtcgccgtttttgcggtcgccggtggcgttggtcacgaggttgtcggtcaggcgcaggatcgccgactggggttcggccgggtcgatgtagcgcatgggattgaaccggtcggaacgggtgaggtccacgaggtcgagcgcgtgcaccgcgtagccgcgcgccttcatcggagactcggtgtctcgtttgagctcgcccttggggtccgtgacggcccagttcatgtccgcgcccaggagattgggcttgacgtagtagcgggtcttgccggagccggacgagccgagcagcagcacgttgaggttgcgcagggtgcgccgcgtgtcggtggagagccgttcggtgcgcgtgaaccgcagattgtgggccgggtcggggtcgatgaacggtttgatgtcacgcgggccggcccagtgggccgagccgtgttcctcgccgttgcgcagggtgaggcgtgccgcgcgcctatacgcccatgcgaggccggccacggcgacgagcgtcagaccgcacagcatgtcggtgggatgcgtggagatgtgcgatgggtccagtaggtctagccagaatcggtcggccatgtcgaacccgctgacgccggcttccatgtcggcgcgtatccggtagccgatcttgtcgccggtccagaacaggacgagcaggccgagcaaggcggggagaatggtcttggcgtggttcatggctgggttccttggatggtggcgcgggcacgccggtcggctgtcagtgtttgcgtgggcaaatccccggccgattggccggagggcatgtcggcatgatcgaggcgttggctggcacgctggcgtatgtggtcgagcgtctgcgctcgtgtcatcggagtggatacggacgacggcatgatggcgctggccgatggccgggcgtcgagcggagtgatgtgggtgatgcttccgttccaggcgatcaggcagtcggcttgtgcgcacatggccgccagcacccgcccgactggttcggtgacggagaacgcggtaatgccggccggcggcgagatgcggctggtcagggcgagttttgcgggcatgatgggggtcatgcgcctgcctccgtgtcgaggctggtggacagggcgatttcgtcggccagcacgaacgctccgttggaatcggaggcgagggtgccgtgcgccatcgtgcgcatgccttgtcgggcgggatggctcctcagccacacgatgcttggcccgtcggctttgacgcgcacgccgatgggccccatgtcttccacgggatcggtcagcacgctcaaccacactgcggcgtggccttcgtcgccaggttcggcgcgcatgtcctcgctcagggtgccgcgcagccagacctgcacggcggggatctctttttcaacgcgcatggccgcctctggtcttcgtcgcggcctccgtccccttcatatcgtttcgttggctggcgcgtcggcgtatgccttccagagcctcgcccttgtccttgcccttggcgggctgccgggcttggtcggccgtgacgatgggcccgggcagcgcgtagcctcggtcgatcggcacgatgccttcctctccggccagatcgatcgcgggcacggcacccacggtcagtcggatctgctcggtggcgtcgccatgttcgtgccggtcggcgatgatgcgttgcaccgtgtcctccaggccggcggccagatcggtggagccgtagggcatgatgcaaccgtagtcgggcgcgccccagttcgtgccggtgccttcgatcgcgtagcgttcgatgtgctcgccttcctccaacaggttctccagacggaaatccggcgcaggcgcgggcgggtcgagcgcgtcgagcagttcgcgcagctcgccacggccgtaccggttggcgtcgggcacgccgttggccaggaggaacccgtgctcgcccaaggtcacgtcgtcgcacagggcgctgtcgcggccgagccaggccatatccatgtacatgccccaccgcccctgcatcacgcgggccaggtcggggtctcgttccacgcaatgccaggcgtacagctcgtccagatcatcgatgttcgccgggtcgatgccggcgggcggatcgtattcgcaccagtcgatgccgtcgcattgggcgatgaggttcgtcaacgacaatggcgtggactgcacgagtgtgtcggcggccatacgcacccgttcgatcatgcccggcgattcgcgttcgaacacttgggccgcgcgggccagcatgttcaggtcatccaggttctcgtactcgtcgggccggtagtccagggcttcgagcagaccgtcgtactcgtagtcatggatgacgtattcctcgtacacacgccccgtggcccgcgcctcggccgcctccggccccaggcccacgatgtcgcgcaggaacctgttcaattcccgttggggcatgggcaggctggcccagcctcctttgagctcgccctcgacatacttgcccagattgcccacccacacgcggatacccaaatcgtcttccgtctccatcgtcaccggctcctcgtctgccggggcatgggcgcggcgtcggccggcatggaaccggttctcgccgatgctcgttggcggatgccgtcgagcgtggatgcacgtccctgcgcgtgctccgtcggcccgtcagagtcggccgccgggccgatggactcattctgccggggcgcgcgttcgggttttgcctcgaccgtcttgttctcggcccgttcgcgttcgtatgccaggcgctgcgccttgacggcccggcatagctgccacgggtcgtcgatgcgcatggtctcgcgttgctcgcccgcgcccctccagagttcaaccgcttcgccgggtttgaatcccacggtcacgggacggccgttgagcttcgcttcgcgcatgcgcggagaggcgaaccggtcgagctgccagccggttaggtccacgccgttgacccgggtgccctgcgggatgttcacgcgcatcatgtcgaacacgcgcccgtcccgtgcggtcatcgcatacgcatgcacgtagcttgtttttgttcaataggaagttgaggttttagtcacgaaggtttttcgggtttaggcggaaaggcatgccgaccacccgtgggccttagcctgatggtgcttctagttccattcgggaaaggtccggaaaggcaatgatcagcatgccccaaatacagtctatccgttcgcgtcgcaggaacggtgagtccatcgcctcgatagcgcgcagcgagagggtcagcgagccgaccgtgcgcaagtatctgagggtcgacgacctatcggccaggccgcccgtgaggcgacgtcgtggttcggtgatcgacgagtggctgcccatgatcgagggcatgctcgccgaggaccgggagacctggcgcaagcagcggcataccgcgacccgcatccatgagcggttgcgcgacgagtacggggccggggtgtcgttgtcgacggtgacccggaccgtggcgcggctcaggcgcgaggccgcggcggagcgggaggccggtttcctggacctgtcgtggcatccgggcgaatgccaggcggacttcggccaggtcgacgtgcgctaccggggcgtcgtgacgcgaatgcggcatttcgtgttggatttcccgtactcgaacatcgggccgagccagctgatgcccggggagaacgcggagtgcacgtgccaggccctcaggaacctattcgaatggctgggcggggtgcccgaacgcatcgtgtatgacaacgccgccggcgtcggacgcaaatggttcgacgggatccgcctgacccgcctgttccaggcgttccaggcgcactacgggttcgagtacacgttctgcaacccgtactcgggacacgagaagggcggcgtcgaggcccgggtcggggccgtgcgccgcaggctgttcgtgccggtgcccggcgtatggaacctcgacagcttcaacctgcgcctgcccggccgctgcctcgaactgggggacaaggaccactacaggaagggcgagagccagaccggcctgttcgacgaggaccgaaaggcgctgctgcccctgcccgccaagccgttcgacgtggtcacgtggacgaggatgaaggccgacaaatacggcaacatcaccgtccagggccgccaccggtacgcggccggacccgaacacgccggccatgagatgatcgtcggcctgagggccctggaggtggagatcctcgatgccgaaggcaaacgcgtgatcacgcatccgaggtcctacggggacaagccgaccgacagcggcgacccgtcgagccagctcgggctgttgtgcgaccggccggcggcctggcgcaacagccgggtgcgcgacgcgatgcccgacccgcttcgcgaatggatcgacgcgcaggacgaggccacgcggcgcgacagcctgcgtgccctgctgcacgccgacggcgagagcggctggcgggcggccgtggccggcatgcccggtgatcctcgaatccaccggaggcacggaccgggccggggtatgtctggccgcggcacgccacgcctcgggcctgggacccgtggcctacgacgaccccgtggacctgagcgaatacgacatcgcctacaccaaggaggacgagtgaaccagaagaacggacggaccgaccccggcccgctgcgcgagcgggcgaggagcctgttcatctccaaggccaccatcgacgaaacgctcgaatgggccacgccccgccaactggacgccatcgaccgcatgctcgccacggaactggccaacagggaggcctccaaacgggcaaggctcatgcgccaggcccggttcccggtgcccaaaagcctcgacggctacgacttcgcgaacgtgcgcctgcccgacggatacaccaaggagcagctgaccggcctcgatttcgcggccaaggcgcaggacctcgtgttctacggcaagacgggacgcggaaagacccacctggccaccgccctgggcatgctcgccatcgagcaaggcaggagcgtgaggttccggcagaccgcggagctcgtgctccagctcggcaaggccaaacgcgacggcgccctcgacagcctgctcagggacctcgcccgtgccgacctgatcatcctcgacgagttcggctacgtgcccttcgacatcgacggggcccgtctcctctaccagatcatcgccggcagctacgaacgtcgcagcatcatcttcaccacgaacatcgagttcagcaaatgggggacgatcttcgccgacgacaaactcgccgccgcgatcatcgaccgcatcgtccaccacggacgcctcatcgaattcaccggccccagccgacgcgtcagccaagccctcatgttcggcaagacggacaaccagtaaaacaaaccaccggccggcactcctcatgccgaaaaccgaaaaaaattagtgacgaaacacgaaacaccgacttgactaaaaacacgtagctgttggggaagttcacgcgcggccagatcaccggcttcgacgatgctggagcctgcgccggctcgccctggccgccccggggaaccgcaggcgcggaaaccggcggcacagcttgcgtggcgctgggagcgggagccggctcattcgagaccggcaatcgaggcgtctgccggggcgcgggctcgtgtttggcttcgacgctttccgcccaggcgaatccggcgtgctcgtcgatgcgtttggcgaccatgccggccgcccggtccagctcctccggagtgaagccgatggaggcctcgggccacatgtcgttgtgctggcgcaccacgtcctcgaccagcagtcgcgcgtcacgttgcaggctgccgtcgcggggccggccggcggcggtgtattcctcgccgcgacgttgcagctccacgcagatccgctggtcctggtcgatgaggttggtcaccagccagcgcacgttgtcggacagttccgccataaggttcctttcggttcgggggatgggctatcggttgcgtgcccgccggtgggagggcgaggtgcgcggcgcggccgcgccggcccgccgctcggcgcgcgcacggatgtcattgagtgtctgccgtttggtcttgacgggcccattgcgccccgatcgttccggcgcgtcgaagcgattccagtccaggccgcgtgtgcgcgccgacaatcgttcgatcaggtccgcgacccggggcgcgtcctcgcgccggtattcgaatcgaaccacgccgccgccgacctgctggctcgcatggggtatgccgagccggtcgaggttcatggcgatgatctgcccctcgccgtcccagggcacggtctggaaatcgagacggccgttggattccgcgcccttctcgaacggcgcggcaagcgccgcgccgggctccggctgcgcctccggcagcgtccgcgaagcctttggctcgatggtctcgatgcgggcgacgggctcgcgttgcgcggcggcatggttgagccggtccacgagcctggcgacgatgtgttcgacggactggatgtccttgccctggaaatgaaggaacacgcgcccgtccttgcggctgcgctcgatgtggaaggtcacgccggcccgtttcaacgcccgcgccacggaggcggcgtgggggccggtgacctcctgcaccgtcaccggctggcccatccgctgcaaacggcgcacgctgacacggccggtgtcgcgcagatggcgcaatgattcgcctgcggcgcgcacgcctatgccgagcacgtcgaacagacggcccactccaaggcgcgccacgtccaccacgatgcgcacgcccgcctcgcccgcgcgcatgagcagttcctgcgcctgatcctcggccgccatcgcttgcctcgcttcccgtcaagtccgttccgcctcctatggcggacaagccaccagcctgcccgcgttcaccgcgttctgcggcggacagtgcgagcccggctgccatcgtctctgctttggccgggccgctcgcgttcgatgaggcgtcgcagggccagggcgtcggcggccagttcgcccgtgcgccgttcctcggccgcgagctccgtttccaatgggcggatgtcatcgccttggtcgcgcgcctcggccagcgcgaccatcagggccagcatgcgtcggcctcccgcttcggcatcgctcctcagcctggcgaacgcctcgccgcgcgcctcgccggctttggccgcctccaccagcactttcagctcgcgcaacgtgtccgccagccggtcggctgcgagggcctgagctatcgtgcgccggtccagcccctccaaacccagatctgcgaaacgccggcggcaataatcctccaagcgcacatcgggccgggcgaaccattcgtacaggcccgtgcagggcacgctcatggcatagcgtcccctggcgtcggtgagcacctggcgcgtgccgtcagccaggtaggcccgccacacctgtccgtcgcggatcgtgcgctccacgggaatcgtcaggcgcagccgccctcgcgtgccgggcacgcgcaccgtcaccgccgtcctcgtgcggcgtgccacgaggctgtcgtggaagccgatctcgtggaccacgcagcgttccagcttgcccatgaccgccagcatgttgtatgccacgcccagccgccggtcggagaaccgcatgcccgaggcaagcacggtgtaggtcaggcgccggcccctcaccgtgacccgcacgccccgtcgttccagctcgcgtcggaaagcgtcgaagccacggctggccatgcacgcctggtcgatgagcgcgcgcacccggtctttggcgttctcgcccctggcgctggcgtacagttgcgccagatcgggcgacaccctgccgcccagcgtcgggtcgatcaccttcaggccgttctcctcgcacagccggtcgctgacctgcctccaacggcccagggttcccctggtcaggcgcatcgccctgcccgtggtcaggtcggccgggcagatgaggatgtggttgtgcacgtgggcccggtcggtgtgcgtggcgatcacgtagtcgtgccgccctgcggtgatctcctgcacgaagcgttcgccgagggaatgcgcctgctccggcgtaatggggtcgtccgggtcgaacgattggatgacgtgcagcgccagcaccgcgcctttgcgggcgctgccgcccttggtggattccagatcgtttaggaacgcggcggcgatcgcatcgcagtcggcgatgtcatggccggtcgtggtcgaggccagccgctggccgtcggtcttggccgggtcggtcacgtaggcgatgcttttggcgagcgtggccttgaccttgcggatcttgactacagccatccgggcctcccctccggctcgacctgacggcttgcctcgacgtgcagcgtggccaggagtccgcgcagctcgcgcaactgggcctgcgcctccatgatctggccgtaggtcgtctcgtcgcgcatgttggcctggcgtgcgatctggttgatgttgttgccgatgcgcgccacctgcgcggcaaggccacgcaggtcgggcggcacgatgatgttcaccgcgtgcgcggttctgatgcggttgcgcgcgaacgccatccaccccacctgccgaaggcccgcgctgcggcgcatccggttctccacgcgcatcgcgtcccggatccaccgccattcctcttcgctgaacgtgaccgacttgagaatcggccgggaacgattgcccttccatgccatgcgctgacgcctcctatcgggttccacgggtgtcccgcctctccgtccgacctggggccggtcggagcgccggtgtagatacaccggcgacgcttgctactccccaaacaccccgccggggcggggtggcttccacaggtcagattccatccgacgtccgcgcgtggcggcggacatccccgggtgacgtttcgccggcacgcggcacggccgtccgccgcacgcaacggccatgcgcctttacgatgcggtcaacgacaccgacactcagcgagggacaaggagcaagcaatatggcgaagcccagcgaacgcaaccgcatgatgcgcgacatcgccggcgtggcgatggacgaggagctgacggctctgcgccgcaagagagccgatctggccaggctcgccgtccaattggacgatatgcgctgggccgccgaacggttccgagagcaggcggaggcgttctgccgcgagtatgcggagccccgctcctacatcaccggcgctctgggcatggccccgcgcgagaccggcatggcgttccacgccgtcgcgcccgactacgcgcgcgacggcgaagcggcgcacggttcgcccgaatcgaacccgcagcggcaagagtcaatggacgcccatccatccggctacactcaggatcaataggattcgacggccaaacggggcggggaggttcgcatgccggtgctgttcatcaccttcggactttcgctcgcgctgggcgtcatacggctgctactgcgcggcatgggaagctgcctggccctcatcgtccacccggtgcgccttgtggtgcgcgtgcttgcgctggccgcgcagacgctcatggtcatgctcctgctgctcgtcatcgcgttcctgctcatgcactttttcgccggctccgacgcccccgcgctcgatggttcgttctggaccatcgtgggagtgtttgccgcgtccctgctcgccaccggcgtgctgggggtcgccgacgaaaggcttgaggaacgctcgcggcgctgaccccggtcacgtttcgccaaccgccgcgcccggcccggtctgccgtccgcgcgagatgattcacacggacggcagacccagcgtctattcggcctgcacgacctcgccggtctcaccggcatcgccggcttcatcggcttccgccgacccttcctcgggcgtttcccgaagcttggcgtcctcttccaacgccgcctccgcctcgccggtgtcggaaccgtcgtccccggagggaatgagactgccgttgagcgcgtcggattcgctctcggattgccggtagcccagcgcgtccaatgcctcgtagagcggtgcggcatggcggtcgatggcttccgggtctcgccacgtcgtccagtcgatggcgtcctcggccgccgcgatgagcagaccgagagcggcgcgagccgggtcgcgctttatcatcgcctcgaccgagacgcgcaacgggtcgaagtccccgtccccgtcatcgccggaggttgcctcgatgctctgggtcaggctggcccagatgtcatcggcgttgctgttccactggctgaatccctccgtcagcacggcgagcgtgaaccgcgaggccagcagggccaccgctcggcccatgcccttgggctgtcccttcagctccatcaggtgggagacgaacgtcaggcgcagttcgcggctcgcgtccgcgaacccacgcgccggggcctcggcccgctcgcgctcctcgcgttcggcggcgaacctctcctcgcgctcccgcttggcctcggcctcggcttgttcgtccacctcgcggtagaacacgaccgcacggccccatgtcagggcacgaatcccgaccaccgggtcgttgccaaattcctcgcgccattcggccacggcctcgccgatgtcgcccgacgagtggtattccaaggcgcgcagtccctcggggcaggaatactgtcccgtctccgacagctcctcctcgatgggctcgatgcccagcccggccagcgtggcgcgggccgaggcgagccattcgcgccatttgcgttccgttttggcttcgcgcaccgccatgttccaattgcgtccgccggcggctttggcgagccgttcctgcaagtccggccatgcctcgtagtcggcgatggtctcccaatcctcgatggacagctgggccgcgcccacatgtgagcgcatatcatcgtcgatggccgcgaccttgagccggcggcgcaccagcgataccgagcgaccggtcttgcgcgcggcctcctcgacgctcgaccccaagtccagcaatctttggtagccatcggcttcctcgacgacggtcaggtcggttcgctggctgttctcgaccagcatcagctcgcgctgttcccgttcgtccagctcggccacgaccgccggaacccgttccaatcccgccagtttcgcgcccgccagccgtcgatggccgatgaccagcgtgaaccgtccctccggcgcgggcacgaccagcaggttctgccggatgccttgggcgcggatggaatcggccagctcgcccacatcgccaacgtcgcggcggggatttgccgggttcgggtcgataagcgccgtttcgagcatgaccaccccgccggcggctggcgcaaggccggtggtttcattgatggcggcgatggtgtttgcggtttccatgatgggtttcctttc

SEQ ID NO: 3106 - DNA, 23997 bp, Unknown
  R215_18m  MAG No. k141_9158
caaggactacgcctccgtgttcgacggcgaccaccgctggaagggcctcgacgtgccggaaggcgagctgttcgcgtggaacgacaagtccacctatgtgcgcaagcagaccttcttcgacggcatgaaggccacgccggagccagtcgccgacatccacggcgcccgcgtgctggcgttgctcggcgactcggtcaccaccgaccacatctccccggcgggcgcgttcaaggcgtccagcccggccggcaagtacctgaccgagcgcggcgtggagccgaagaacttcaactcttacggttctcgccgaggcaaccacgagatcatggtgcgcggcacgttcggcaacatccgtctgcgcaaccagctgctcgcctccgtgggcgaggaggtgacgcctggcggcttcacctacgacttcctcgccaagaagccgaccacgatcttcgaagcctcccgcgactacatcgacaacaaggtgccgctcgtggtgctcgccggcaaggaatacggcaccggctcctcgcgcgactgggccgccaagggcacggtgatgctcggcgtcaaggccgtgatcaccgaaagcttcgagcgcatccaccgctccaacctgatcggcatgggcgtgctgccgctgcagttcccggcaggcgaatcctatgagtccctgggcctcaacggcaccgagacctacgatatcgccggcgtcgagaagctcaacgagggcgtgacccccaagacggtccacgtcaccgccacccacgaggacggctccaagaccgagttcgacgcggtggtccgcatcgacacgcccggtgaggccgactactaccgtaacggcggcatcctccagtacgtgctgcgcaacctcatgaagtaaccaccttcttggctcccctctcttgaggggagctgtcagcgaagctgactgaggggagcaaggccggtatccgccaacggataccggcctttttccatgcatgccaaaatgctatactgtatagcatcttcgaaatggaggttgccatgaccatggtccaaatgaacgttcgcattgatgcgaaactgaagaacgaggtcgaagaagtcctcaagggcaaaggcgtatcggtgagtgacgtaatccggtcgctgtggttatacatcgccgaccgcaaggaagtgccggcattggaaacgaccgccgaagagcaagcccgcgaggaggaaaagcagcgcaagctgaaactgattcgagaaggtgccggatacgtacacaaggaactggtcaaggccggactgatctcagaagacaccgacctcatggaaggccttacctacaagcagttccgcgacaaaatgtacgacgagcaacttgatgcgtattacaacatgaagagggccgattgatgaccgacgtttccatgcagcgtattttgcttgataccaacgtactgttggactatttgctccatcgcgatgatcacgccaagatggcggaagcggttatggaacttggcgcgaagaacaacgttacgttgttgtgcgcgtcattgtcgctgaaggatatcgcatacctatcatcatcggcgattcgtagggaattcaaaccgaatgaatcggaagtggagaatttcactcgcggctttctgtcgtcacgggtgccatggcgttgtatcgagcaggtgaaggagatgtgtgacatcgtcgctgtcgatgagtcgacatgtgataaggctttttccctgcaaaaacggcatcgggattttgaagatgatctgatcatcgttgccgcgcaacaatccggtgccaactgtgtggtcacatcggataccgaattaatcagtcattttcccgaatattgcaaaacaccggctgaaatcgtggcggcgctggaataaatgagcgtgtggctcccctcacggaggggagccaacaatgatgtgccggcttactgtagactactgcgcctgtaagcggaactgcttccagatgtcgctgagcttctgaccgttgcgcgtgcgcttccacacgtccagaccaccgccgcgacgtcctccggcggcggcacgggccgcggcggtcggagtcggatattcggagccgtcatccagacggagacgaccgttttcggtgaccgtggcgaaccagcgctcgcccttgcgcggccgctcccacaccagacgctcgcccggcaccagcagaccagcgtcaatcacctgccggatcgtgacgcgccgcgaactatgagacggccgtggagaggtcttcgacaactcatcgacattctgcttggtcagatcacgggcgtccttgtcataccggatgccccagtattccacgatgagtcggaccgactcttcctgccgcgcctccagcagggcaggtgtgcagtcagcgaaatccttcaactgattggtcagcgggaaacgacgtgaatccgcgcgcaacagcatgcggtcgcgacgtgccggatattcactcaacctgtccaactgatcctcagggccctgcaccagcgccatattgccgagtcggtacatccagaaatcatgctgatcctgcggccagtccgcaaacgatttcgaccgttcgatatccaacggcataatcggcagcgcactgaaccggcgtggtcgatccaactgcatgccggccttctgctcgttggcgcgaatcagcagcagacggaccaaatcgccgtcaccctgcatctcgccatgcaaacggaccaatgcgccttcacggtcgccgtccgagacatgcaacccgttcacgcgctggaccaaatagcccttgtcaagatcacggatggcggcgttcgcataaccgcgccgctccaacgctccagtgcgattcagcgtgcggatgcccgtcacctgttccaatgcggtcagaatttccaacagccgacgctcgtcatgggcacccaacgattccagcgtggccgtggttctggcgatacgcgaggcacgaaccacaaacggcgacaaatcggcgtcgcccagcccgcgatacgaattgaccaacgcccacatggccacgggcttccactcgtggctgcggtaatcgtccaatccctcaagccggctacgcacctcggcgggcaatatggtgtcgctggggcgcgcgatgatccgccacgccatcgcatagggtgccagcacctggttgatgaacgtgggcaccgtgcctttgtcgatgtacggttgcagcacgtcggccaggaaatcctcgatgagcttgtcggtggccggcttgtgcgtgagcacgagatgcagataggcgaagaattcctcacagtcatgcggatcgtcgccaagcgggtcaatgatgtcatcccaacgggctgcgtacacgtcaagttcggcggtcgacaggctggccgtggcgcgcgccttgaacacgtcggacggggtgagcggcaggccgcgcatgttcatcacgtcgaagatgcgatgcgcgccgtcgagatcgtcggtggtcacgatgacgagcgtcacctcgttgaccagatactgcgcgaattgctggcgttcggatgccgaccaattggagatctcgtcgtacgtcttgcggatgttggcgacgatgttgcgttgcgcagcggtcgccagatcgtcgtcgttcatgtcgaacacggattcgaggttgtcctcctgcacgtgttcgcggaagaacgccgcatcgcgctcgcgcaacgtgaggcgaggctcggtgacgatgccgcgcagcttgtcgccgggctccaccagcagcgcgtcgagttggcgcatgaggtccgggtctcgctccagatcacgcagcacggcgatgatgatcgacagggataccagccgctgctgcccgtcgatcacgtcataacggttgtcgccctcgcgtaccagaatcagcgagccgaggaaatacggggtaccgggtgacttgcaggcgtcgtccaagtcgcttaccagttgcaggatgttctcggccttccatatgtaggcccgctggaatgaggggattgtgaaccggaaatccggggtgaacactttcccgagtggtagttccttcgcgctgattgccatgtcaatcccttcgtcgccggcctctggacggtatgccgacgtgccgactgtgctcaagcctaccagtgttcgcccggcggcgggcgcatcacgccggctcgggcaccgacccctcgtacaagtagaacgaagacgggttttctcccggcccggatgcgggcagtgactgctcgcacacctgcgtcaggccgcgatgtacatagaatccgacatcgcacgtggtatccgtgaataggaagtactgacgtatgccggctgcgtggaatgcgctcatcatcgtctcgaacatgcgccggcccagaccgtgaccgcgcgccgccggatcaagtacgaacagcaccacttcagccgaatactcatggccaatgttcgccgcctgcttacgcagttgcctatcgacatgaagagtcccgagaatctcgctcgcagctgccatgccgtcgtgggcaaacgccagttgcaatagcttgcgcaacgaatgacgccggtgcatgttcagcgggctgcgatggtcgagctcgtcgatacgccccacaatcaatgcgacgggtttatcttccagctccgcgacaaaggccgtggtcacacgtgccagacagttctcccaatcggcctcggctgccagcaagccggtccgctcatcatattcggcgtaccaagtgcggcgcaccaggtcgatcagcgccggataatcgtctttacgtaacgttcgaataatcgcttcactcatgttctccattatgactgatatggctcgataacccgacgtgttacagtcgcgccggcaaatcggcccgctccaccagcctcgccatctgtacgcggcccatattgagcttgtccgccgcggaggagagatgcgccttggccgtacgctccgagataaacatacgggaggcgatttcggcgttgggctatgtgctgcaagacgattcgccgattacggtgtatgtcactgcgttcctatcaacggatcaagacaccaaggtgacgcatgccttcacgttgcagtgaatcgcgcggcggtccaagctgcggtcgaatgccaatcgaatctcaagtgcatgccacgcgcatggtggaaacgcccgttacgctttgcgatgagcagaacgagccgatcgatcctattcatggaatgttcagctttgttcctctaagattggtactggaacaaacgctaaaggagcgattatgacattcggtcagcagccccagaacaacgggcaatacaacccgcaatacaacacgcctgattacaacgccgcccaacagtctggatatggccagcaatacgcacagtccggttacggccagaactactatgcccagccgcagggtgcccccacctaccagtacgcgccgcaggatgcggccggtgccggcgcgggtgccgccaccatcaacacgacgatgacctacaactacgaggaggcccgccgcgtctccgtagccaaggtgtacggcgagatgaccatcggcatcctcgtcaccgccgtggtcgccgtgctcggccagatcaccggagcctactacagcttcctcatggccaccggcatggtgggcctcatcggcctgtgcgtggtgcagattgccctggccgtggtgctcggcatgcgcgtcaccaagatgaagtcggccactgcgcgcgtcatgttctatgtgtacgccgcattgatgggcttcaccttgagctcgatcttcatggtctacgacctcggctcgatcggcgtggcgctcggtgtcaccgcagcgttcttcttcgcgctgaccatgttcggcatgactaccaagttcgacatgctcaaggccggcccgatcctgatgatcggcctgatcgtgctcatcatctcgcagatcgtgctcgccttcgtgcaggtcgacggcatgaccaagatcgtctgcgccatcggcctgatcctgttcgccggcatggccatctacgacgcgcagtccacgcgcgcgctgctgaccgaatacgaggcccagggcccggaaatggtcaagaagatctccatcctgtgtgccctgaacctgtacctcgacttcgtgaacatgttcctgtacatcctgcagctgctcggcaacagggactagcctcgccagccgattggtgggcggcatgtagcctgctcgtcaaacgtcacagcccgaccacattgtggccgggctttttcatgtctgtcacattcgcacgttaggctgtctccccgtgaaaagacaagaactcgtaggcatgctgagcctgttgttgaccgcgctgatctggggttttgcgttcgtggcgcaggtccagggcatggatttgatgtcgccgatgttcttcaacgccacgcgcttcacgctgggagcactgtctttggtgccgattctgctgtggcagcgtggccgggggagcgcggataagggcgatacagccggggtcgatgtcgttgggaccgaggcccccagggccgtctccacagatgccgcatcgaacggtgcatccgacgtcgttaccatcaccggtgccaagctgaatgcgaacaagcccgattcggccgtggcgcgattgctcgccaacccggtggtcatttccgtgatctgcggcatcgtgctgttcaccgccagcaccctgcagcagtatggcattctgtacggcaaatcggccggccgcgcgggattcctgaccgccatgtacattgtgatggtgccgttgctggcctgcgtgttcctgcgccggcgcatcggcatgctggtgttcgtggccgtggtgctgtccatcgccggcttctatctgctgtgcatcaccgatggtttcggttcgatcggcctggcggatatcctgctcgtgttcacggccgtgctgttcgccgtgcatattctggtgatcgatactttgggcggcaccgtggacgccatcaagctttcattcggccagttctgcaccaccgccgtgctgagctgggcgggttcgctgatcgaaggctcggtcgactgggccggcgctgctcattcctggattccgattctgtacgccggcatcggctcggtgggcatcgcgtacaccttgcaggtggtcggccagcaatgggtgccaccgacgcgagccagcctgctgatgagcctcgaatcgttcttctcggcggtaggcggtgcgttgcttctcggtgaagtgatgaccccgcgcggttacctcggctgcgccctcatcttcctcggcaccctgctggcccaagcgccggccaggctgccgaagtggctgcaacggtgaatgaatcggacgcaggccgattccatagcacctcagtccgtggtcttaggcgcttcacccacttgcggcgcgccgttgatgtcgcggtggatgttctgcatttgcacttcgatgttctgcagcgaacgggcgcagtcgagcagtgtctgtgaatgctcgctgagcttgttgtccggcaaatcggtcttgtagcgcagcgcatgctccagcgacgcccaataatccatggcgatggtacggaactgcacctccaccggcgtgtaatgcgcgcccgaggagagaaacacgggcaccgcgtagattacgtgcaatgaacgatacccgttctgtttcgggttcttgatgtaatccttgacgcgcagcacctgaatatcggactgcgacgacagatagttggacacggaatacacgtcgtcgcggtaattacagatcacgcggatgccggccacatcgaacagattgtccttaatcgaattgacactgattggcagattcttgcgctccagcttgccaatgatcgaactcaccgacttcagacggcgttccatatgatgtatcgggtcatggctgaaccgcacctggaactcgtcgtcgagaatctccagcttggtgctgatctcgtacatcgcgccttcatacacctgcatgaggtcaacgaatttaacgacctgttcgggagtgaaggtgcctcccggaagatccaacgctttgagacgggcctgtagatcggaggttttgagtcggctatgtcggtcaagtatcacgtccaccaatatactcggcggattccagacaatctggatgttcgcggggaatctttccaagaacccatatttaagatcgtgacaaccaatggcatacgtgaccggagcatgacgaaccccgccgatagaatcggtcgttatgaatgaagacatgatgaccgaggcggagcgtgcctcgattgcagccgatggaaccgatagcttgttgggggagcgcggcaagggcgtattccatatccacacgctcggctgccagatgaacgtgcacgattccgagcgcatcgccggcgtgctggaggccaatggctacgtccctgcaaccgaggaccagatcaatgacaatgacctcgatctgctggtgctcaatacctgtgcggtacgcgagaacgcagccgaacgcatgtatggcaccatcggccgattcaatcgcgtcaaactggttcggccgaacctgcagatcgccgttggcggctgcatggcccagcttgaccgcaagaagatcgcggatactgcgccatgggtttccgcggtgttcggtaccaagaacatcgaagatctgcccaagctattggatcagaatcgtgcgaccggcaaggcgcaggtccaggtcactgaacaattgcggcagttcccgagccagcttcccgccgcccgcgcctcccgcatcagctcgtgggtggcgatttccgtgggctgcaataacacctgcacgttctgcatcgtgcccaccacgcgaggcaaggaaaaggaccgccgccccggtgacattcttgatgagattcgccaatgtgtggccgatggtgccaaggaggttacgcttctcggccaaaacgtgaactcgtttggttatggtattggcgatcgatacgctttcagcaagctgttgcgcgcctgcggaaccatcgacggtctcgaacgtgtgcgcttcacttcgccgcacccggccgccttcaccgatgatgtgattgcagccatggccgaaacgccgaatatcatgcatcaactgcacttcccgctgcagtccggttccgaccgcatcctgcgcgcgatgcgccgctcctacaggtccgccaagttcctcgatatcctcggtcgtatccgcgaggccatgcccgacgcccaaatttccaccgatatcatcgttggattccccggcgaaaccgaggaggacttccagcagaccatggacgtggtgcgccaggcgcgcttctcctcggcgttcacgttcatctactcgccacgccccggcacgccggccgccgcaatggaacagattccgcgcgacgtggtgcaggaccggttcgaccgactggtggcgttgcaggagcagatcaccgaagagaacctcgccacattcgagggccgcgacgtcgaagtgatgatcaccggcaaactcggcaagaaggacaccgacacccaccgtgtcaccggccgcgagaaaaccggcgtgctggtgcacatcggcgtgcctgaaggcgaaccggtacctgaaatcggcgatttcgtcacggtcaccgtcacacacgccggccgccataatctgcttgccgaccccgatgtggccgctggacagacctattccgtgcggcactgagggggcgtatatgacgcaacgagtcgtctccatcgtcggtcccaccgcgtcaggcaagacggggttgggcatcgccatcgcccggcgtcttgccgaagtgggggagcgggccgaaatcgtgaacgcggacgcctaccagatgtaccgtggcatggatatcggcaccgccaaacccaccgccgaagaacaggcggccgtgccgcatcatctcatcgacgtcatcgaccccgaagacacgatgagcgtggcccgattccagcagcttgcgcgcgagaccatcgccgacctgcaatcacgtggcatccggccgattctcgtcggcggctccggcttgtacgccagagcggccatcgatgacatcacctttcccggcaccgatcccgacgtgcgcacacgtcttgaggaacgcgagaaaaccgagggtgccggtgctttgttcgacgagctgcgggccaaagaccccgaagccgccgcgcgcatggacccacgcaacccacgccgcaccatccgtgcgctggaagtcatcgagcttaccggcaaaccgtattcggccagcctgccgcgctaccggtacgtgattccgtccgtacagatcggactcgacctggaccgcccggatttggaccatcgcatcgacctgcgcaccaagcagatgtatgacgatggattcatcgaagaagtcgaacggctgcgcccgcatctgggtgccaccgccgtacgcgcgctcggctatcagcagatcatcgacctgctggacggtatctgggatgtgaacgacgccttcgcggacatcgcacagaaaaccaagcgactcgcccgcaaacagatgggatggttcggccgtgacccgcgcatccactggctgcaggccctgaacccgaaactggtcgacaacgcgatggccattatcgcgcacgccgacgccggcgactacgacccgatcgacgcccgagccgacgaatacacccagcatcatctgggcgatatcacggcgtaggaatcagccaaaggccggtgcaatcacccgcaatcagtgtgcaggcccctgattccagccggcgatcaagaacacgcgcgtcggattcgccgggcgtagtatcgcgtcgaacatcgtctccagtgcagacgtgtcgccccgatatgccgagtgcttggcggagcgatactcctcgcgcgtcactgagccccagtcgagatcccagccggcgtcatgcgccaagcgtgaaccgaatatacgcagcaccatcgcattgccgccacggaacggatgcagataaccgagctcatcataaatagaagcgaacgcgtgaatgaacacgtcgcgatccaacgcatgcaggttgcgcttgtccgccaactccatcgcgatgttgtgcgcgccggtctcaatgagcccagccgggaagaacgcctccggattcgcggcccgagcccggtcgttcgtcacctcgcgtgtggtgtttgaggtacgcaacttgcccgcatcctcgaacacgccttcgaacagccccttatgaatggcggtcaactcgtccaagtcgccagacggattccaccgacgttccgccaacaacacggtacgtgcgaacaccgcatccgcgcgatccgtggcatgatcatccagactgccggcagccagacgatcctttccggcagggtcggcggcggcgcgcagacgcatggcggtctgctcgtccgccacgtcgatgagatgggtcacgggttccaagccacgttcgtaggcaaccgcggcgcgcatcgttgcctcgcccggcgtcatcgcttccagtgcgcagttcttgagtgcaaatgcgactgcgctcgcacgctctgcgggtgtcatgcaacccatgataaggcatattcgcgctccagcggggaatcgactcggacgaacctcgacgaaccgcggcgaatcggctgtcgggattcgtcaatcgaccatatcgtcacggtgtcgtcaccaaccatgcacccccgtactagtagaatcagacccgatatggcacgaacagcatcctccaacagcaccaaaccccgtaaatccaaagacaacgggtctacccatgatggcgaaaccaaggtccagcccgagcttgacctcgaacctgagccgttgtggaagaagatcctgctcgcgattccgcgcgcgttcggctccggcgtacgcgccgtcaccggcgtcggcgaatacgacccagcctaccgtcgtgacggtttgtgcttcctgctgctcgtgctcgccgtactgttctgcgcgtccgaatggttccgtgtcagcggtccattcggccagctgcttcacgccatcgcggccggtgtgcttggtctgatgagcgtcgtgctgccggtgttgctcgccgccgtggccttccgactcatgcgcaattccggtaaagggtccaataacccgcgtgtggtcaccggttgggtgctgctcatgtggtcgatttgttcgatcatcgacgtggcgatcgccgccgaccacaccggattcgacatcacgattctgcaatccgccggcggcctgttcggcttcttcctcggctcaccgctcgcctggggcctttccaacgtgttcgccatcatcattttcgtggtcgtcggcctgttctccttgctgatgattaccggcacccacgtcaccgatttgccggaggatgcgcgcaaaatcgcagctaaaatccaacgcaaaccgtatgtgccgatgggccaggaggccgacggaagcgccagccagttccccaacgaggtccgtgtgggagataccacactcgcctttgccgacggtgttccctcgcatgacggcaacgacgacggcaacgacaacgatcaggccggcgatgcacggcccagcctgttcgcacgactgttcggccgcaaatccaagaccgaagacgacaaaacccttgacaagtatgctgccgacgatccgttcgaccgtgccgccagccagcatggtgccaccgccgaaaccccggtggtcgatccgatgaccggcgagattaccggtgcgcgaaccattgcatcgtcttcgtacgacggtcgtccgcacctatccagccctgcgcctgctgccgatgcggatgatggcgacgcttcccgaacccgcgtcatcaccagtggccagaccatcgccatgcccggtgggggagcggtagacgatccgtgggcacccagtgccgcccaggccggtactgtcgcgctcgcaggggcagccggggcgatgggagcggccggggccgccggtgccgcggccgcggcagccgcgaccggagcctacgcaggcgccgatgcggatggcagcggagtcggccagggcgtgcccaatacggacggacagccgaatgccgccgccggcaacggtacagacgacgacgccaataggccgtatcagttgcccgacctgaacctgctgaccaaaggtcagccccatgcgatgcgcaccccggccaacgatcgcgtgatccgggcactgacttccaccttcgaacagttcaacgtggacgccaaagtcgtcggcttcctgcgtggcccttcggtcacccaatatgaggtcgagcttggccccggcgtcaaggtggagaaagtcaccaacctgcagcgcaacatcgcctacgcggtggccagttcggatgtgcgcatcctttcaccgattcccggcaagtccgccatcggcatcgaaatcccgaacgaggatcgcgaaatcgtgcacttgggcgacgtattgcgctccgacaaggccgtgggcgacccgaacccgatgctctccggcatcggcaaggacgtcgaaggccacttcgtgaccgccgacctgaccaagatgccgcacctgctggtggcaggtgccaccggttccggtaagtcgagttttatcaactcgatgctcacttcgatcatcatgcgtgccacgcccgaacaggtgcgtctgatcatggtggatcccaagcgcgtggaactgtccgcctacgcaggcatcccgcacctgctgaccccgatcatcaccgatccgaagaaggccgcacaggccctcgaatgggtggtcaaggagatggatgcacgctactccgacctcgaattcttcggattccgccacgtcaaggacttcaacgaggccgtgcgcgccggcaaggtacatgcgcccgccggctcccagcgcaaggtggccccctatccgtacatcctcgtggtggtcgacgagatggccgaccttatgatggtggccaagaacgatgtggaaagctccatccagcgcatcacccagctggcacgagccgccggtgtgcatctggtgctcgcaacccagcgtccgtccgtggacgtggtcaccggtctgatcaaggccaacattccatcccgactggcgttcgccacctcgtccgccaccgattcgcgagtcattctcgacacggtcggtgccgagaccctgattggccagggcgatgcgttgttcctgccgatgggttccgccaagccgattcgtgtgcagggctcgtgggtgtccgaatccgagattcgcaaggccgtggagttcgtgcgcacccagcgcaagccgaagtaccgcgaagacatcgaacagatggccaaggaagccgaaaagaaagacagcatggagccggacgaggagatcggcgacgacatggacgtgctgctgcaggccgccgaactcgtggtcaccagccaattcggctccacctcgatgctgcagcgcaagctcagggtcggcttcgccaaggccggccgactcatggacctgctcgaatcgcgtggcgtggtcgggccgtccgaaggttcgaaggcccgcgaagtgctcgtccagccgcaggacctgccgcaggtgctcgccttcatccgaggcgaaaccagctcgctcgaagccagcgccccgcaacaacccgaactcggcgaataattcacccatcgacctccctctgatgagggaggtgcccgaaggggcggagggagagaagcgcggacagcatcagcacgaaacctgattcccgaataatagcagtcaatatccagccaccactcactcaaggtaggagtatgggggtaacgtgaacactatggatgagaacacaatggataagcagtcatcgtccgggtcgtcgctgttcgacgggtggaacgcgccgccgaacttggtcacctactcgcgcatcgtactcgtggtgattttcctgacactcgacattctcgccggttcctggggtgagaacaacctgatcatgcgttgggtcgccgcggtactgttcatcatcgccgcgtccaccgataaaatcgacggttggatggcccgcaaatacaatcaggtcaccgaaatgggcaagctcatggatccgatcgcggacaagctgctcacttgcggcgcaatgattgtatgctccgcgttcggcgagctcggctggtgggtgaccatcctgttcctgattcgcgaaatcggcatcaccgttatgcgcttcttcgtcatggagcgtccgggcggcaaggtcatcgccgccgcatggcccggcaagctcaagaccgtattccagtgcgtgggtctgtccatgctgctgctgccgttctggtcattgggtaacggacaggccacgccgttctggatgaccgcttactacttcctgacctacgccatcatctacgtggcattggtcctgtgcctctactcgggtgccgtgtacctgtacaacacgttcgtcgccccgaagcggaagtgacggatattccaatgcaggaattgtgcgacagtctcgcggccggcatcctcaagatctgcgaggcgaacaatacgaaaatctcctgcgctgaatccctgaccggtggcctgctcgccgatgcgttcgtgcgtattcccggtgcctccaacgtgttgctgggctccgctgtcacctacgacatcaatgccaaggcctcgatcctacacgtggacaaggccctattggatcgagaaggcgccgtacaccccgaagttgcccggcagatggccatcggtgccgctcgcctatacagccagccggaatacggcgaccgaatcatcggcctttccaccaccggcgtggccggccccggtccggacggtgataagccggccggactggtgtatgtgggcctgcgcatccccgcaagcctcaccgcggaccatgccgaagtgctcaaagccgtcgaactccatcttgatggcatgcgcgaagaggttcgtcgcctcaccgtattccacgttctgcaaaacttgagtctattcacagcaagttttaaggaataaaaccgcgggaccgtcgtgttgtatatagtggaaacactgaaccgaccttggaaggggcgatggcgatggaaacgatgacccgagtgaacgaacagatggatgtggccgccaagaagccgatggctgtgcagccgggtgtcgcccgtatgcgtgaactgactccggcccagcgccgtgcggtgatgttcgcccagcagcaggtgctcaaggcgcaggctgccaagaaggccaaggatcagcgtcaagccgttcgtgaacgtatgtgggatgaggattcgccgtcgtacaagccgactgccgccgccgagcccgtggtggttgaggaggagcctcgcgaggtttcgctgcgtggtgctatcggctacgtgctgcgcgaactgcgtacgcgcgatcgccgcacgttgcgtgaggtctccgagaaggcgggcgtttcgctgggctatctttccgaagtcgaacgtgggcagaaggaagccagctccgaactgctgagctccatcgccgatgcgctcggagtctccacttcgcgcatgctgcgcatggtggccgattatctcgactcggtcgagggctgatcggttggcggtgtgaagccgcatcccgtaatctatgtctagctgtgaacccgtatcgcttgtggcgatgcgggtttttgctgtcctgcgggtggtggcacactggcgtgtatgcgtgaacgggaattctgggaattacttgaagaggtgttcggtcggacctacggtcgttcgctgtcgcgtgatcaacggatgtccaaattggcgaatatgaccgtggtcgaggcgctggacgcgggggaggagccacgcgtggtctggaatgtgctctgtgaccaaatggaggttccggactccaagcgttggggccacgatcataacgcgccgcccatgcccgccgtctgacactgcgggattacggagtcgctgaatcgtgaaattggcgatttcggcgtgttgcacgccaaattcgaacaaatgttcgtgtgtgtggttatagttattcacagtgacaagaagccgcatacgtgtgcacagggtgcttgtcatccgccataagccttaccgcagtaggtcttagggaggtcagatggccgagctcgggcaagctggaaccacaatggttggtttggattgcctcacatggcatgtccgtcatacggtggaggcatccgattcgcgcacgacttcgacaaggagaagatcatggcacttgagaccaagccggccaaggacccggcagccgaggacaagcacgagctcgatcccaagcgcaaggcggcgctggacaccgcgctggcgcaggttgagaagagctttggcaaaggttccgcaatgcgactgggcgaccagcccgagcagaacgtcgaggtgattcccaccggttcgttggccctcgatatggcgctcggcatcggcggcctgcccaagggccgcatcgtggagatctacggccccgaatcatccggtaagaccacgctcgcattgcatgtggtggccaatgcccagaagaagggcggcgtggcggcctacatcgatgccgaacacgcactcgacccggcctacgcccgcaagctcggcgtggacaccgactcactcatcgtctcccagccagataacggcgagcaggccctcgaaatcgccgacatgctgattcgctccggtgcacttgacgtcatcgtcatcgactcggtcgccgccctagtgccgaaggccgaaatcgaaggcgaaatgggagacagccatgttggtttgcaggcccgactcatgagtcaggcgctgcgcaagatgaccggcgcgttggctcaggccggcaccaccgccatcttcatcaaccagctgcgtgaaaagatcggcgtgttcttcggcaatcccgaaaccaccaccggcggcaaggccctgaagttctatgcctccgtgcgtctcgacattcgtcgtattcaaaccctgaagaatggcgacgaagcggtgggcaaccgcacgcgcgtcaaggtggtcaagaacaagatggccccgcctttcaagtcctccgaattcgacatgctctacggtgaaggcatttcccgtgagggctcggtaatcgacatggctcagcaggttggcgtggtcaagaagtccggttcgtggttcacctatgagggtgatcagctcggtcagggacgcgagaaggttcgtcagttccttaaggacaacccggccatcaccgaggagattgagaacaaggtcaaggccgagttcggtctgatcggttccgccgaccagttcgcggaagatggcgaagccgcagcagcggccgctgtcagcgaggccgccgctgccgacgtggccaaggacagcaaggccgcagcggcgcctgctgccaaaacgacccgtgccaaggccggcgcagctaaggcctgaacatgattagtgccgaagcattcttgcggcgcaatcctgttgcgtcgcaagacatgcccattgccgagcagcgtgttcagccgaaaccgctgggacgtttttctcgacgggggagagacgctgccgttgtcgaagatcccaatgatttggacgcttgccgcgaggctgcattgcgtttgctggacgcggccccgcgtgcatccggcgcgttgcgcgaacgattgctcagcaaaggctatggcgaggcgattgtggacgaggtcatcgaacggctgattcgcgtgcaactgattgacgaccgcgcttatgccgaatcggccgtacgctattgtgccggtcgcatgatgggtcgtcgtggtgcggtcctggaacttgctcgcaaaggcgtggaccgcaaactggctgaacaggtgtgtggcgaagctgagcaaaatggcatctttgaagatgccgcatgggaattgggccgccaaatagcccgcaaaacccatggcctcgatcgtcaggtccgtcagcgtcggttttggtccgcaggcggccgcaaaggacacagccccgaaaccctccgccgagtcgccgccgaattgttggcgtagccaagaaaaaaatgagacctctcataccccgggttctgtcgtgccgtgcgcgaacgcacggcacggatggccatccatctcgacctgacgttgccgccaggctctagcagcctacccgatgacacgggcgagcagcccttaccgccatctgcttggccttgctcccgatgaggcttgccatgcgacctactgttaccagaggcccggtggtctcttacaccgccgtttcacccttacccgtcgaggacgggcggtctgttctctgttgcgctatctctcaggtcaccctgggcggacgttatccgccatcgtgctctatggagcccggaagttcctcagccgatcccaatgaagatcacggccgcggccatcaagaggtctcaagcctgcaattatacataaggtgcggaaaaggcggcatcccgccctgcggtgaggccatgacgttgcccagttatctgttttctccatagttgggcatagttgggcgattcgtgaacgacgcgccgaatatcggatggggcgtgtcgggcgtgttgtggcgtgtcgtatggagacgaatcaaatctgtaagagcttggtatgtgcgagaaagagcaagaaaacgctgcctatccattgcagtatttaccatgacgaacaaacgagccagcctgataaaccggtatcaaatcttcttataggagactgctgccaaaaccccagtatatacatcgtttcattgcagagaaaagcccgggaataaacatatattctctgggcgagtttccggccgttcacccattgttcgtctacaatgaaacatacccggtcggtgatgatgccgttcggaacacatatagcgggttacaccgcttgagttagaggaggtcaacatggaaatcgtcgttaccggacgccacacgcaggtcaagcaaaggttccgtgatgtggtcgagaccaagatgaatcgtgtgaccgctatcgccccggatgctcagcgcgcgcagatcgtgctgacccatgagggcaacccgcgtcaggccgataccgccaagcgcgtggaaatcaccgttatcgccggacgtaccgtggtgcgtgcggaggcttccagcaccgatgaattcagtgcgctggacatggcgctggataagttgacgctgcgtctgcgtcgtactcgtgaccgtcgcaaggatcaccgtcgtggttacgcaaacccggtcccggtggatctgggtgttaccgccccggagcccgagccggaggtgtcggaggaagagccgaacaacagcccgcaggctgcggtcgcctccgatcttggccctggcgaatccgtggaggtccaggttggggatacgccgattgtcatccgtcgcaagctgcacatcgccgagcctatgagcatcgacgaggcgctgtacgagatggaactgatcggacacgatttcttcctgttcgtgaacaaggagaccggacgcccgtccgtcgtctatcaccgtcacggttggagctacggcgtgttcgaaatcgacactccggagaatgtcaagaaagcctgagggtaagggctgctgacatgatcagctgataccgcatggaccgcttccaatacggaagcggtccattttttcgtaaaaaggtcgaaaaattcgattgctgacggtgcgaggcgctattctggtacgcggacaccaccacttatcagtcaagggagaacccagtggtcgatattgttgacaaagccctgcgaatgggtgaaggccaccagctcaagaagctggagaacgtggctaaggccgtgaacgccctggaggacgagatctccgccctctccgacgaggacctgaaggcccaaaccccgaagttcaagcaggaaatcgaaaacggcaagagtctggacgagatcatgcccgaggcgttcgccaccgtgcgcgaggtctccaagcgcaccctcggccagcgtcacttcgacgtgcagctcatgggcggtgccgccctgcactggggcaacatcgccgaaatgaagaccggtgaaggcaagaccctggtcgccaccctgcctacctatctgaacgccctcgaaggcaagggcgtgcacgtggtcaccgtcaacgactacctcgccagctaccagagcgagctgatgggccgtatctaccgcttcctcggcatgaacgtcggctgcatcatcaccgagcagaagccgccggagcgccgcaagcagtacaacgccgacatcacctacggcaccaacaacgagttcggcttcgactacctgcgtgacaacatggcctgggagaaggccgacctcgtgcaacgcggccaccactacgccatcgtcgatgaggtcgactccatcctcatcgatgaggcccgtaccccgcttatcatctccggcccggccgaaggcgacgtgacccgctggtaccgtcagttcgccaagctggtgctgaagctcacccgcgacgaggactacgacgtcgacgagaagaagaaggtcgtcggcatcctcgacccgggcatcaccaaggtcgaggatttcctcggcatcgacaacctgtacgagccggccaacaccgccctgatcggctatctcaacaacgccatcaaggccaaggaattgttcctgcgcgacaaggactacgtcgtcacccaaggcgaggtgctcatcgtcgacgagcacaccggccgtatcctgccgggccgccgctacaacgagggcctgcaccaggccatcgaagccaaggaaggcgtggaggtcaaggccgagaaccagaccttcgccaccatcaccctgcagaactacttccgtatgtacgacaagctcgcgggcatgaccggtacggccgaaaccgaggccgccgagttcatgaacacctacaagctgggcgtgctgccgatcaagaccaacaagccgatgatccgcaaggaccaggacgacctcatctaccgcaccaagaaggagaagctggccgccatcgtcaaggacgtggccaagcgtcacgccaagggccagccggtgctgctcggtaccgcctccgtggaaagctccgaagtggtctccgccctgctcgacgtggcgaagatcccacaccaggtcctgaacgccaagcagcacgagaaggaagccgccgtggtcgccgtcgccggccgcaagggcgccgtcaccgtggccaccaacatggccggccgtggtaccgacatcatgctcggcggcaacgtcgagttccttgccgacgccaagctcaagtccgaaggttactctccggaagacaccccggaagagtacgagaagcgttggccgggcaccctgaacgagatcaaggcccaggtcaaggacgagcacgaggaggtcaaggagctgggcggcctgtatgtgctcggcaccgaacgccacgagtcccgtcgaatcgacaaccagctgcgcggtcgttccggccgccagggcgatccgggcgagtcccgcttctatctgtcgctggaagacgatctgatgcgtctgttcaacacccagctggtggcccaggtcatggccaagggcatggaggaaggccagccgatcgaggccaagtccgtcaccaagggcgtgcgcaccgcgcagaaggccgtcgaatcccgtaactatgagattcgcaagaacgtgttgaagtacgatgacgtgatgaacaagcagcgcaccgtcatctactccgagcgtcaggccgtgctcaagggcgaagacatccacaaggacatcctgcgtttcatttccgacaccgtcgagtcctacatcaagggtgccaacaagggatccgagaaaccgaaggactgggattgggagggcctgttcaaggcgctcaacaccgtgatccccaccaaggtcgacgaagacgaggtcaggaagatcgtcggcggcctcaagggtgcgaaggccgtcgaggccgtgcgcgacctgatcgtcgaggacgccaggcagcagtacggcgaaatggaggagaccatcggcgagaccggcttgcgcgatctcgaacgccgcgtggtgctcgccgtgctcgaccgcaagtggcgcgagcacctttacgagatggattacctcaaggacggcatcggcctgcgtggcatgggccagcgcgacccgctggtcgaataccagcgcgaaggctaccagatgtacaactccatgatcgaggccattaaggaggagaccgtccagctgctgttccacatcgacatcaagcaggtcgccaccaccgacgaggccgttgacgaggtcgaggagaccgccgaaagcgccgacaccatcgccgtggcctccggccccgacgagaacggcgaatccgtggtcgaggccgccgagggcgaagtcgaggaagaggacgaggatacggacgccaagcaggcgatcgccgaatccgcagccgcctccggggccggcgagtccacgctgcctgttgccggaccggctccgatcagccacgccgaaggcaaggtcccggtttccaagcgtccgaagagcgaagagctcaagacgccgtgggccgacggccgcaccttccctggcactggcaagaacgccccgtgcccgtgcggttccggccgcaagtacaagatgtgccacggccagaacgagaagtgacgcatcgctagttagtaactagctcatggctccccacacggggagccattttctatgcggttcatcagcatgtattcgtgcggtgccgtacgcgcgggacggcacgcgattttcgcggattttgacgtcgtatcccacactgttgcgggatggcacgagtgtcaatcgattgactagcgtggcgtcccgcagtacgaattacggaatcgttgaaattccgccattctcggtgttatggtgtcacggtccgcaaagggtgatgtgggacggcacggctcaaacggcgaaaaagagctgccgtcccgcagttttacgggatagcacaaaaaagaggcttctgctgttttcgtgggttgggttcttggttgtggtgggcgtatgtcgagtccgccgcggcggagcatgacgagggcgatgggattgttcgcgtggtggaagccgtaggccatgcggatggtgaccttgatcctg

SEQ ID NO: 3107 - DNA, 106021 bp, Unknown
  R215_18m  MAG No. k141_10225
ccgaattcgcgcagcatggggaccatgccgttgcctccgatgcaccactcgtgctcgtggcctgttcaggcgggcgcgattcgatggcgctggccgcggtaagccatatcgtatgcacgtccatgggcgtgcgttgcggtgccgtgattgtggatcacggcttgcaggagggttccgaacaggtcgccggcgaggctgcgaatcgttgccgtgcgttgggactgggcccggtcatcgtgcgcaacgcaaccgtgcaggcacgcggtgagggcctcgaagcggccgcgcggcaggcccggtacaacgagctgtgcgccgcggcgcgtgaatcaggtgccattgccgtgctgttggcccacactatggacgatcaggcggaaaccgtattgatcggactgctgcgcagccgtggcgtggatgcgttggccggcatgccgcaggtcttcacacgcagtggcgtgacttttgcgcggccgctgcttacccttactcgagacgaaaccaccggcctctgtgaagacttgggtgtggaatattgggatgaccccaccaatggcgatgcggtagacggcgagttgccggacgactatccgttgcgctcgcgggtgcgccacgacctgctgccggccatcgaacgattcgctggattcaatgtcacccgccatttcgccgaaagcgcacagctggccagaatggacaaggagtatctggatcagcgatccgacgaggtgatgggggaggcggttacggcagttgaccggccggcatcgtcggcagcggtatcgaccgatacgccacgagcctgtgctgcagacgataccaacgattcgggccatggcatcggcctgatgatcggcgtcaaacgtattgcacgtgagccagaggcgattcggttgcgggtcatcgctcacgcgctgagccaggccggtgtgaacgccagtgccgcccagattgccgccatcgaccggctggtcgtcgattggcatggccaaggcggcgtctcacttcccagaggttattcagccaatcgcaagaaacacgtcattcgcgtgtgccaagatggagcgcatgcgaatcgctgacgttgaggaagatattgaccacgagctggtcagcaaagaacagatcgatgccaagatccacgagatggccactctcgcgagcgaggattaccgcgataagaatccgctgctcgtggcggtgctgaaaggggccgtgaatacgctggtcgcgttcacccaggccatgagcattcctgtacagatcgacttcatgagcctttcgagctatggctcgggcacagtgtcgagcggtgaggtcacagtcaggcaggatttgtccgccgatgttcgcggacggcacattttgattgtggaggatattgttgattcaggacgcacgctcgcgtggctggtcgcagaactgaaacgtcgtggtgccgcttccgtggaggtcttcgctttgctgagcaagccttcccgccgagaagtggacgttgatgtgaagtacgccggctatgagattccggacgagttcgtcgtcggcttcggcctcgactttgacgagcgctaccgcaacctcgattcgatcgcggtcctcaagccgtccgtctaccaaggagtgcaagcatgagcttcccgcaagggccgggtaacggcaataatccgaacccggacaacaaccgtaacaacggcaacccgttcaccaacccgttcaaccgtggcaataacgggaccaatggcaaaggcaacaacaacgagaaccggccgatatggcagtccccctggctgtggggtgccgtactcgtggtcatggtcgtgctgatgttccagatgttcgccggcggtggcacgaagaccattgacaccaaagatggtttcgcgctgatcaatcagggcaaggccacgtacgccgagattacggacaacaagcaggtcgtccgccttaagctgaagaacgactacaccaagaagaacgccgacaccggcaaggtgaccaactacggcaagaacgtgcagttctactacaccttcgcgcagggcgcccaagtggccaaggccgtggagaacggcaaccttgagaagggctggacctcgaacatcgagcagaccagcatgctgagctacctcgtcacctcgatcctgccgttcatcatcttcttcgccctgttctggttcctgatgagtcgcatgggcggtgccggcggcatgctcggcatgggtggcaagaaaaacagcggcaagctgctcgacggccagacccccaccaccaagttcgccgatgtggccggcgaagacgaggccgtggccgaagtcgaggagatcaaggacttcctcaaggatccgtccaagtacaaggcgctgggcgctcgtattccgcgtggcgtgctgctgtacggtcctcccggcaccggtaagacgttgctggcccgagccatcgcaggcgaggccggcgtgccgttctactcgatggccggctccgacttcgtcgaaatgttcgtgggtctcggtgcctcccgtgtgcgtgacctgttcgatgaggccaagaagaacgcccccgccatcatcttcatcgatgaaatcgatgctgtgggccgcaagcgtggctccggcatgggcggtggccacgacgagcgcgagcagacgctgaaccagctgctcgtcgagatggatggtttcgacaacgacaccaacctcatcatcatcgccgccaccaaccgccctgacgtgcttgaccccgctctgctgcgtccgggtcgattcgaccgtcaggtgggcgtggccgcccctgatctggaaggccgtgaggcaattctgagggtgcatgccaagggcaagccgttcgtaccggacgtcgacctgcacatggtcgccgtgcgcacgccgggcttcaccggtgccgatctggccaacgtgctcaacgaagccgcgttgctgtgcgcccgtgccggtgcccagttgatcgacaaccgcgccatcgacgaggccatcgaccgcgttcaggccggaccgaagcgcaagtccaagggcatggctctggaagagctgcgcaacaccgcataccacgagggtggccatgcgctggtagccgccgccctgaacaacaccgacccggtgaccaaggtgacgattctgccgcgaggccgcgccctcggctacaccgccgtcatgccgacctccgaccgctactcgcagtcgcgcaaccagctgctcgaccagatggcctacgcgatgggcggtcgcaccgccgaggaaatcgtcttccacgacccgaccaccggtgcctcgaacgatatcgagaaggctacgaacatcgcccgtacgatggtgatcgaatacggcttctccgacaagctcggtgccatcaagtggggttccgacgatgaccagaccactgtgatggacggtctgcagccgcgcaagtactccgatcgcaccgccgaagtgattgatgacgaggtgctcaagctggtggagaccgcgcacaccgaggcgtggaccatcatcaacgacaaccgcgagatccttgacgagctggtccgccagctgttggtcaaggagaccctgaacgagaaggaacttgcggcgatcttcgcgccgatcaagaaggctccggttcgtccggtgtggttgtccaacgaccgccgccccgactcggacaagccgccggtggagattcccgaaagccttaagcgctcggtcggcatgaagccggaagagtagacacgatgacgattcggcccgacctgttcatgtggtttctcacgtacgcaggccgggccgacgtcgttgtggacaatgacaagggagagatgagatgaacgaatatatagagtcttgccatcgggagaaacacacatacgacgaggaaggcgtgcgcgaggccgtacgtctgttcctgaagtcgattggcgaggatcccgagcgcgaggggctggtggaaacacctgaccgtatcgcccgcgcgtgccgcgagctgttcgccggtctgcaggcttccccggccgatgtgctggagaagcacttcgacgtggataccgacgaactggtgctggtcaaggacatcgaactgtattcggtgtgcgagcatcacctgctgccgttccacggcgtggcccatgtgggctatattcccgccaaggacggggtgatggggctgagcaagctcgcccgactggtcgaggtgtatgctcgccggccgcaggtgcaggagcgtttgacccagcagatcgccgacgcgctggtcgagtatgcgggcgcacgtggtgtgattgtggtgaccgaatgcgagcacctgtgcatgtctatgcgcggcatcaagaagtcttccgcccgcacggtgacctctgcggtgcgcggcatgctgcgcaatccggccacccgagccgaagccatgagcctcattttggataaatagtgtctactaagctccctcatcatagggagctcacttgggacctacatagaaggggaaacataatgactgatttgcaggcgttgcatgacactacgcacaccatggtgatgggtgtgctcaacatcaccgaggattcgttctcggacggcggcctgtggctggacccggccaaggcggcacagcacgggcgcgacatgatggccgccggcgcggacatcatcgacatcggcgccgaatccacgcgccccggcgccaagcgcgtgtccgaggccgacgaactggcccgcatcaccggtgccgtcaagacattgattccggccggtgccatattgtccatcgacaccacgcgcgcatccgtggccgccgctgcgctgagcgagggcgcccagatcatcaacgacgtctccggtggcacgctggatgccgaactgccgcacgtggtcgccgaccacgactgcctgtacatcgtgcagcattggcgcggttggctcgccggctccaagggcgcgaaccccgatcaagacacctccgtctacgagcacggtgtattgaccgacgtacacgacgaactcatgcgccaagtcgacggtgtgctggccgccggcgtaaagcctgagcgcattatcatcgacccgggcctgggcttctccaagcccggcatcgagcacaacctgccgctgctgaccggactcgagaccttccgagccaccggatatccggtgctgatcggccagtcccgcaaacgcttcatttcggcgatgcttaccgaggcgggcgctgccggtgctgatgggccgatcatggcccagcgcgatgacgtgaccgcagccttgtccgccctgtccgccgaacatggcgcatgggccgtgcgcgtacacgacgtggccaaaagccgcgccgccgtcatcgccggcaacacctggcgcgaatacgcatgattcccctggctccctgttttggttgcttctaggccttggctcccctcggacgaggggagctggcgccgaaggcgactgaggggagcatttgagcagaaagccttaccaatggacaccatcactcttaccggcgtacatgccaacggcacccacggtgtgctcgcctttgaacacgaacggccacaaaccttcgtcgtggacgtcaccctgcaccttgatctggccgccgccggtcaatccgacgatctcaacgacaccatcgattacggccgtgtggccaaggatatcgcggctgtcatcgaaggccctcatgtggacctgatcgagcgtctggcccaacgtatcgcggataagatccttgccgatgcgccggccgtcgcctccatcgacgtcaccgtgcacaagcctcatgcgcccatcgtcgtggcttttgcagatgtatcggtctccatctcgcgcgtgcgtgccaccgataatggacgcactgctgaagagcatgccatccataacgcggtggtggccttgggcggcaatgtgggcgaggtggaatccaccttgcgagccgccgttcgggagattgacgcgctgctcggcacacaggtgaccggtatctcaccgctttaccgcacggccgcgtggggcatggctgacggtacgccggatttcctgaacgccgtggtggagcttgaaaccacaatgggcagccacgaattgctcgccgcgttgcaaagcatcgaggcgaaccatgggcgaattcgtgagaatcattgggattccaggccgttggacttggacattatcgactttgatggcatcaccagcgcggatccggatctggcattgccccatccgcgtgcttggcagcgcgcgtttgtgctggctccttggttggcgctgaatccgaacgccaaacttgccggagcccatgaggggcctgtagccgatttgctggccgccgcaccggaccgtaacgccgtgcagctcgagagcgaagactggatgctcggcgggcatgcagtcaagcaaaaatcagcgtcggagtcggcacccgtctcacgcaaggcgattatttcgctggattccacctcgcaggatgccgaacggctgttccgcgaaaccatcgtttccatcgacagtgttcctggcaatcaggtacagggcatctcgccgctctaccatgtcagccatttcgacggcccggacgcgatgagcgcggtcatccaaatcgaaaccaagttgccgcccgccgacctgattgccgtattgggcagcatcgaaagcgttcatgatctggcagtcgaccttgaccttgtcgacatggaaggcgtgacttccgacgagcccaactgcagcattccttggccgtcggcccgtaaccatgcgtcggtattggcaccttggctggatatggacccgaatgcttctctgggcggcgacccggtggccttccttttggccatggcaccggatgccggacaggtcggattgctatcggacaactggatactgtcgaacagttgagctgatggcagaaccagttacgaacggtaggctagaaaccagacggtgacggaccagtctccggcttcgaacagccgggcacggcagtgacgaaaaccaaatcaagatgaacagcccaggcgcgagggccgttcgcaaacagcaaacagcaacgcaacgataaggaggccagacatgaaaacacggcgaacaccatggtggcagtatgtgatcggtgccgtgctgggcctgttggcgggtatcggtctggcctcctacggcgaaagctcgggactgtcgctgattggtgcgccttggattgtgaccggattgctggccgtgctgggcgttatcgtgctgatcttggccctgcaagtgcataaatacgcgaataccgaccccaagaagcgtccgcatagcttcatcaatcccactatcgcggtgtatacgctggtgctgtctaaggcactgggattggcgggcgcaacgctcgccggctggtatggcggtcagattgtgatgagcctgagccatatcgaggcggatttctatgcacacgccgtcaccgagtgcgcaatcgtggccgtggtgtgcatcgccgacatgatcatcggcattatcggcgaatggttgtgccagctaccgccgaacgaaggccccgaaaacccgaaaatcaaggaagccaagcgccgtagcgacatagcccaggcctacaaaagataatccgtgataagccccctctgacgagggggccgtaggcgtagccgactgggggagagaagaagaaaaaaccacaccatcggccaagccgattcccgctattcctgcggcacgcgaaccatagcttcctgagcgatggccgccaccaagtcgccattctgcgcatacactttggcgatgccgagtccgcgcccgtgcgcggcgataggcgtatcctgcacatacaaatgccattcgttgatatcgatatcctgataccaccacatcgaatggtcgatggacgcataggaaatgcccggtgtggaaatcgacagtccggcgcggcgcagcaccggctccatcatcacctgatcgcagccgagtgccagcatcgcacgatgcatgacctgcggcacatcgacgtggccatcggccttcatccacaccatctgcttgccggaatcatgctcggcggaatccttgtctgcgcgcagcatcacggtcggcgtcacgtggcggatatcgaatggcgatttctcgacatagaaattggcgaacggcgacttttcggcgaacggctgcatgagttccttggcggaagtcaacgtttcgggatcgggcaggttttccggcatcggatcggcaaattccacaccctcctgaccggtctcctggaaggaggcgatggccgtgagaatcgacccctcggcttgggtgacgttgacccgacgagcggagaacgagcggccgtcgcgaaggttctcgacgtcaaacagcaggtcttgacgaatatcgccggcggcaatgaaatagccatgcaccgaatgcggcaggcgtgaagggcccacggttttggacgcggcgatcaccgactgggcgatgacctggccaccgtagacgcggccagtggggaagtacatactctcgccattgatgtatgtgtgattgcggtaagcggaaggctcgcccaacttcagcaccttcaccagatggtccaatggagttacggtggttgcctgagccatggcgttcctcgattcctgttctgctgtgttcgatattcggttatcgtattccaacctatggttggcagtctatccggtgggggttaagagttccgggagcgaaatgtaacgagactgtttggaaggtaaacggttggttatgcggtgcgttgccgctacgttgctgctgcactgccggtgtgttgccggtgcgttgccgtaggtgactgtgggattttatgggatgcggggcggggcagtcatgggggcaattatgggaaagccgcccctgagggacggctttcgacgtataaagcgcgttgtggcactaatgccggcgtatctcagccgcgcacaagcttcttgtgcaggcggtgcgggcgggccgcatcctcaccgagtcgggccaccttgttctcctggtaggcctggaagttgccttcgaaccagtaccacttggccgggttgtcgtcgtcgccttcccacgcgaggatatgcgtggcgacgcggtcgaggaaccaacggtcgtgggagatcaccacagcgcagcccgggaactcgagcagcgcgttttcgagggattccagggtctcgacgtccagatcgttggtgggctcgtcgagcagcagcaggttgccgccctgcttcagggtcagggccaggttcagacggttgcgctcaccaccggacagcacgccggtcagcttctgctgatcggcgcccttgaagccgaagctggccacgtaggcgcgggtcggcacttccacgccggccacctcgatgaagtcgaggccgccggacacggcttcccacaggttcttgttggggtccaggccttcacggttctggtccacgtagctgattttgacggtgtcgccgatcttcagctcgccgctggtcagcggttccaggcccacgatggtcttgaacagcgtggacttacccacgccgttcgggccgatcacgccgacgatgccgttgcgcggcagcgtgaaggacaggtcgtcgatgagcacgcgatcgccgaaagccttatggatatggttggcttcaagcacggtggagcccaggcgcgggccggccggaatctgaatctcggagaagtcgagcttcttgttgttgcgtgcctcgttctccatctggtcgtaacgttccaggcgggccttgttcttggcctgacgggccttgggggaggagcgcacccagtcgagctcgctcttcagtcgcttggcgagcttggcgtccttggctccctggatctccagacgcttggccttggtctccaagtaggtggagtagttgcccttgtacgggtacaggtggccgcggtcgacctcgcagatccattcggccacattgtccatgaagtaacgatcgtgggtgacggcaatgacggcgcccttgtactggtgcaggaactgttccagccacaggatggactcggcgtccaggtggttggtgggctcgtcgagcagcagcagatcaggggcctcaagcagcagcttgcacagggccacacggcggcgctcgccaccggagcacacgttgaccggggtgtccggatcggggcactgcagggcgtccatcgcctgctcaagctgggagtcgaggtcccagccgtcggcggcgtcgatctcggtctgcagcttgcccatttcttccatcagcgcgtcgaagtcggcgtccgggttggccatttcttcaccgatctcgttgaatcgggcgaccttctcggcaatcgggccgaacgccatcttgatgttctcgcccacggtcttggtgtcatccagcggcggctcctgctgcaggatgccgaccgtgaagcccggggtcagcgtggcctcgccgttgctcacggtctccaggccggccataatcttgagcagggtggacttacccatgccgttcgggcccacgacgccgatcttcgcgccgggcaggaagctcagggtcacgtcatcgagaatcacgcggtcgccgtaagacttgcgggccttgatcatctgaaatacgaattctgccatataagtgtcttatcctgtcttatcgttgcaatttcaacgttttgccgggcttggattccgtgatgacacactgtggaacgatgcgtccggtttcgggggttccgaacgacccgtttgatgccgcccgtccctggattttccgtgtcatcgcggcgcctcggtcccaagcaaaagcaccttgtggattatcccatatcccgtctacacgatgcaatggggttctggcgggcgggaattagcgattcggtcatcgggaggagacgtggaaggcggcggcgatgccgtcaatgccgacgccggtaaatgggcgctgggcatgccctgtttcctgagcgagagcccggccctgtatcgtctggcgatttgtcgatcgttgcgattccggcgttctgccgggctttcatttcgaaatgacgcatctggaatagcgcggccgtctttggtgctcctctcttcagtgatccgccgaggttacgcccatggctgaacgcccggaatgtcccgcgaaatccggtgagacggtctaggccgcggatgtaccgtgaatggcgcataggcgtgtcggtcgccgcaatcatggcaatgagaggaaaccccgttatggatcatgcatcccgatctcagcatcagactcaggccgatgcgtcttcgatctcttcaacgaatccgacggcctcgtcgccgctgcccacccaggcgccgccgtggggcgcgctgtgggtgatggccctgggattggccatgatcgtgctcgacagctcgatcgtcaacgtctccatccccaccatcatcgacgacatcggcattaacctgaccgacgcccagtgggtcacctcgctctacaacatcgtgcttgccgcgttgttgctgcctttcggcaagttgggcgacgccagagggcgcaaactggtgtttcaagccggtaccgtgatcttcgtggcgagttcggcgctcgccgccgcctcgcagggtgcggagatgctgcttgccgcccgtgtgctgcagggcatcggaggcgcgatgatcatgccgaacaccctgtccacggtgtccgccctgttccgtggcaagtaccgcgccgcggcgttcggcgtctggggcgcggtgatgagttcggccgccgcgcttggtccgctgctcggtggcgtgttcaccgagaccttgggatggcgttggatcttcctggtgaacctgccgctgggcatcgcggtctttgtgtcggccatcttcctggtgccgcagaccggtgggaacgcctcggtcgccggtgccgcggatgccgcgcaggatgtccgatcccgtcgcgtcggtgtggatatcccgggcgtggtgttgtctgccctgacctcggccctgttggtgttcggtcttatcgaaggcgagacctacggttggtggaagcagacctcaacgcagttgaagctcggcgggttgagctggaatcgtgactggttgtcgccggtgccgatctgcctgatcgccggcgcgcttctgatggccgtcttcatcgtcttcgaatccgcgcggggcaaagccggtcggccggtcatgctggacatgaccctgtttcgcatcaggacgttctcgtggggtaatctggcggctgcggccatcgccgccggcgaattcgcgctggtgttcatgctgccgctgtacctcatcaacgcccgcgggctcaacacgctgcaggccggtgcgatgctggccgtgatgggcctggggtccatcgtcgcaggtgcgcaggcccatgtcatggccgccaagctcaccccggccggcgtgattcaactcggtcttgtgatcgagatcatcgccgtcgccttggtcgcggtccttatgcctgtgggattgtcggtgtggtggcagcttgttcccatggccgcgtacggtctgggtctgggcttcgcctccgcgcagctgaccagcgtggtgctctccgaagtgccgatcatgcagtccggcgaagggtcggccacccagtccacggttcggcagctcggcaccgccgtcggttcggccatctccggcgcgtcgttggccatggccgtcaacggaacattgccggcgcggctcgaatccctcgggctgcccgccaaggtcggtgacggtctggcccaagcggtcagtggttcggcgggtggagtgatcggcgtgttccgcagcggtgatggaccggcggcccaattcggcgacgaggcgccgaagattgccgatgcgatgacttcagggttcgtcgaaggcggccagtggacgcttctggtcgccggcatcatgctgttcatcggtttgctggcctcggtggccgtgcgtcgtgccgcgttgtcgcacaacgtgcgttgacgcatgacggctactgtcttatggggagtgcggtcgtgcgcggtcgaacgatatggtccgcataccgtccaccacacctgcggtcggttcgccggtggaaggaacgatgtatcagacggcgtgtcgtaatccgatgatgctgtaacatatcctcttgtgcctcagcgaggcacgcacggccccgtagctcagttggttagagcgccgccctgtcacggcggaggtcaccggttcaagtccggccggggtcgccaccaaactcccgatgcctgtcgggagtttttttgtttcctgccgttcttcgatgccatccgcaaggacggtgaaagtgattgcatccgattcgacacgccgtccgcaccgatgccggcgttaagggggcgcccgtttgcaacgggtgaaatgcatgaggaagcgcatcggcggaatgttcgcgacgcatgacgaaccacggaaaaaccgcggtgggaggtcatggcggctcgctactattttcgctatctcgcatgttacgaaagtcttcaaggagtaagccatgaccacgctcgccattgatatcggaggaaccaagatcgccgccgccgtctgcgatgaaaatgacagcatcatccagcgctggcgcgtccccacgccgatggacgccgacgccatcaaccagcacatcgccgaggtgtaccgcgaggctgtggccgccgggcacaccgatatcgaggccgtcggcatctccgccgccggcaatgtgagcgcggatcgcaagacgctcaccttctccgccaacattccggcatggatcaactacgatctgtccgagcacgtcggcgcgctgatcgaccatgccgtgccggtcatcgtcgaaaacgacgccaactgcgccggatggggcgaattcgtgcacggtgccggccagggtagctccaacatggtcgcgctgaccgtgggcaccggcctcggcggtgccatcgtgatcaacggccagctctaccgcggctccttcggcatggccgccgagctcggccacctgccgatggtcccggacggcgaccactgcggctgcggcctgcgcggctgcgccgaacgttacacttcgggaacctcgctggagaacttcgccaagtccgccgtgcgccgtcgtcctcaggacgccaagcgtcttctggaactgtgcggcggcgacatcaccaaactggaggggccgatggtgtcccaagcggctcaggaaggtgacgtacttggcctgtatgcgttcggcaagatcggcgaatggctgggccgcaccatggccgccgtttccgccgtgcttgacccggacctgttcgtgatcggcggcggcgtggtggccgtgggcgacatcctgctggagccggcccgctacaactaccagcgtttcctggaaggcagcgcctaccgcggccatgccaagatcgtcgcggccactgcgggccaggatgccggtctgatcggcgcggccaacctggctctgcgctgacgatgtcgctccggcaacgggacgttagtctaatggtgagtcatggccggtgccatggctcactgccgcgctgatagtgcggtcgatgagtttccgctgcctgaccatggaatcgaattccgggttctcagcgatttcctcgtactcgtgttcggtggtcacgccggcgatttcggcgataatctcctcataggacgtttcgacggttcgatgcacgccggtgacgtgcccctgacgtatcacgacaatgcggtcggataccgcgaacacatccggcagatcgtggcagaccatcaccacggaccggccttcggagcgcagtctcttgatatatgcgagcacttccgccgactgcatcaccgacagtgcggcggtcggttcgtccagcagaataagctgcgggtcattgagcagcgtgcgtgctatggccacggtctggcgctggccgacggataaggatgcgataggggagccgacccgaatcgccgagctcagggtcttcagcacggaacgggcacgcgagttcatcgaatcgtcatcgcgtatgccaatctgattgatctccttgccgaggaacaggttcgaggccacgtccaggttgtcgcagaactcctgcccctggaacaccgatgcgatgcccatgcggtccgcctccctgatcgagggaatggtcacctgttcgccgttgagatagatatggccgaatcccggctgcagaaatcccgcgatgaccttgatcagagtggactttcctgcgccgttatcgcccacgatggcgacgacctcctggcgttggatggacagattcaccgatttcaacgcctcgacgaagccgaacttcacacagatgtcctccagccgcagcagaggaggtgtgctcgaattcctcatggtgtgttccttcttctcactcttctcctggtaccggtcactggctgacgtcattgcgaaccgagaactcgatggcgcataatgcgccgcctagcgcgcagttgtcgttcgggtgggatgacacgagtacatcgatgggtgccacggcatcagggaacagcatgcgctgcaacgcttcattgaacggttggatgaatacgtcgccggtcatggccagcttgccgccgagcacaatgacctccggatccacgctgatgcacagatcagccgccacctgaccgatacgcacggccgtgtcggcgatgatgcgacggcaaccggggtcgccttcgttggcaaaggacaccagatcatccagcgtcatattgccgtgtgtgacgctgagcaactgcaccagcctgttttccgccacgacggtgtcaaggcagccgcggttaccgcacgaacagatggcacccagcgggtcgacctggatatggccgatttcaccggccaggccggtcacgccatgcatgatttcgccgttgatgacgatgcctgcgccaaccccgtcgttggctgagatatatacgaaattgcgtttgcctgccgccacgcccatacgggattcgccgtatgccgcgaaattcgcgtcattatcgacgtatacgggaacgttgaacgccgtgcgcaacggggccgtgatatcgacgccgtcccatccgggcagaatgccgggaatcgctatggtgtggtcgctggtggccaccggtgcggccacggccacgccgatgccgaccagctcgctggcttcggcgtcgatgctgctcagggtctcattgatgagcagcatggcgcgttccagcgttgtgtccgccttgtggcccaacggcagggggagcgtgtgctcagcgatgattgacttcgagaagtcaacgatagaaagcgtaagatgacgtcgcgcgatccaaagcccgacgccgaggccctgatgccgtgcaagggtcaccagagtggctctgcgaccgttgcgaacggtgtttttggtctccagctggtcttcgtcgacaagctgatggacgagcgtggacacggtcgcagtggacagtcctgtcacctctgccagttcgacctgtgtcatggcgccgaacttgtggatgctggccagcaagttggcgcggtttgcctcgcgaagcgaggtctgcgaaccgaaaagccttgttgccataagagttcagtgtagtcgttaccggcatgaggcacagcgaggcgcagagcgtggatttttcggcgtgtcgccttgtgatgcgcgaaaaatcgccattgcgttcattggtcgaacataaacgacaggaaattcgctttcttgagtttgacaacttaactcaatacggtattctatgagatgaacctgaggttattctcaggttcgggcgaccaaggagggttcgccatcccctcgaagatgaaggagaacaaatgaagttcactaagaagatcgtcgccgtggtggcaggcgttgccatgtgcgcgggcctcgcggcctgcggtggcagccgtagcggccaggcaactggcggtgatgccaagatcgaaaagggcgccactatcggcatttcgatgccgaccaagtccgaagagcgttggaacaaggacggcaacaacctgaaggccaagctggagaaggccggatacaaggtcatcctgtccttcgccgacgataagccggcccagcagaacgctgacatcgagaacatggtcaacaacgacgccaagatcgtcgtggtcgcttccaaggacggcaccgcagtgggccccgccgttgagaaggcccgcgatgcaggtgccaaggtcatcgcctacgatcgactgatcatgaacaccgacgccgtcgactactacgccaccttccagctggagcaggtcggcgtgctcgaggccacgtggctcattgaccagctcaagcttaaggatggcgccaccggcccgttcaatatcgagctgttcaccggttccccggatgacaacaacgccaagtacttcttcaagggcgcttgggatctgctgcagccgtacttcgagaagggcgtgctcgtctccccgtcccagcacggtcagggtggcgtgaccaaggacttcaccgttgaggattggcagaagatctccgtgatgagctggaagaccgagcaggcgcagaaggacatggaatccatccttgactccacctacgcccacggcgagaagctcgacgcggtcctcactccgtacgacggcatcgcccagggtgtgatcaacgccatcgaatccaagcgtcccgacatgaagccgggcaccgactcctggccgtacatcaccggtcaggacgccatggagatcgcagttgccaacatcgccaaggataagcagggcgagaccgtgttcaaggacgtgaacaagctggctgacgccgtgtacgacatggtcgtcgagatcgccgagggcaaggaagtctccggcctgaacggcaagttcaacaacaacaacatcgacgtcccgtccaagctgcttgacccccagaacatcaccaaggacaacctccaggatctggtcacggccaactacatcacccaggatcgcttcgacgagctgactaagtagtcctcatcaggcaatccgtaaacaaacacaatgacatgcggcgcatagccgatatgcgccgcatgtccatgaacacagaactgtgacgaggagtgatgacatgtcatcaaatgacaccatcttgacgatggaaaacatcacgaagacgttcggtccggtcaaagccctcaccgatgtgaatctttccgtcgatcgcggcgagatccacgccatctgcggcgagaacggtgcaggcaaatcgaccctgatgaacgtgctttcgggtgtgtacccatacggtagctattccggcaaaatcacctttgatggcaaggaatgcaaataccatactattaatgattccgaggccgacggcatcgtaatcattcatcaggaactggcgttgagcccgttcctgtccattgcggagaacatcttcatcggcaacgagcaggccaagggtggcgtgatcgactgggacaagacccgcgccgaggcgaagaagctgctcgatcgtgtgggacttcccgaagacccggataccagagttatggacatcggcgtcggcaagcagcagctcgtcgaaatcgccaaggcattgtccaaggacgtgaagctgctcatcctcgatgagccgaccgctgcactgaacgatgaggattccgcccacctgcttgacctggttcgtcagctacgtgacgagcagggcgtgaccagcatcatcatcactcataaactcaacgaggtcgccgccattgccgacaatgtcaccatcattcgagacggttcgaccgtcggtgtgatgtacgtgacgccggagacgccgctcgaccaggaagaactcatccgcaagatggtgggtcgtccgctgcacaacctgtacccgaaccacccctccaataccccgggcgaggaatacctgcgcgtcgaggattggaccgtgcatcatccgctcgacgcggagcgcgtgatcgtagaccatgcgaacatcaacgtgcacgccggcgagatcgtcggtctggcgggtctgatgggtgcgggtcgtaccgaaatggccatgtccatcttcggccactcttacggttccaacatctccggcaaggtgttcgtcaagggcaaggaagtcaagatgcccaacgtgcagtccgcgattgacgcaggtctcgcctacgccaccgaggatcgtaagggcaacggtctgaacctgctgcagaacatccgagagaacgcatccctggcctccctgaccaagatcagcaagggcggggttgtggacgacaaccttgagcgcaaggaagtcgaacagtaccgcaaggacttcaacatcaagtgtcatgacatcgatgtgaatgtctccaccctctccggtggtaaccagcagaaagtgctgctcgccaagtgggttatctcgcagccggacatcctcatcctcgatgagccgacccgaggcatcgacgtcggcgccaagtatgagatctacgaaatcatcgataagcttgccgatgcaggcaaggccgtcatcgtgatttcctccgagctgcctgagctcatcggtatctgcgaccgcatttacacggtgtcctacggtgtcgtcaccgacaatgtcgagaagaatggatttacccaggaatacctgatgaagggtatgaccaaggaaagggaggtggcagcctgatgagcgccgcaactgcaacacctgcaaagaaagaagaaaagaccggcctgctggccacggtcgccaacaatgcccgtcaatacggtattgtcggcgcactgctgatcatcgtcgtggccttcgagatcctgaccggaggtgtgctgctgaagccgaactccttcgtgtccctgatccagcagaacgcctacgtgatcatcctggccattggtatggtgatggtcatcatcgccacccacatcgacctttcggttggttccttggtagccttcatcggtggtgtgtgtgcactgctgatggaacgcgccggagtcaactggatgctcgccatcgtcatcgctctggtcgtcggcctgatcgtcggcgtctggcagggcttctgggtcgccgtcatcggcatcccgggcttcattaccactctggccggcatgttgatcttccgtggtctcgccaccgtgatcgtcggcgaatccgtgccgattacctccctcgaattccgtggcattgcccgtaactacctgcccaacatccttggctggtggggtccgttcgacggtctgaccattgtgctcggcatcctgtgcattgtcggctttgcctggagccagctgcgcaagcgcgcccgtgtggccaaggtcggcctggtgcccgagccgatgagcctgaccgtcctcaagattgtgcttgtcgcggtcgtcatcgccttcgtcacctacctgctggcttcctccggtaacgctgatcagggtggtactccgatcatgctggtgatcgtcggtgtgctggtcttcatctacaacttcatcctgaccaagaccgtgttcggtcgccacgtgtacgccgttggtggcaaccgcaaggccgccatcctctccggtatcaacacccgccgcgtggacttcctgctgttcgtccacatgggcttcctgtccgcagtggccgctgtctgcatgctttcccgtctggcttccgcaactgctcaggccggtatggagttcgagatggacgccatcgctgcctgcttcatcggtggcacggccgtcaccggtggtattggtaccatcccgggcgctgtgattggtgcattcgtgatgggtgttatcaaccagggtctgtcgattatgggtgttgacaccgccgtggtgaagaccatcaagggcctcgtgctcctgctggccgtcgccgtggacatcatatccaagcgcaagaagagctgaccttcccctttctcctcctcgatgtgggattcgtgccggtgccgctggtgcggatcccacactgttatctgccgtcattcttgtaatcaaaggactttttccgccatgaaactcaccgcgcgctccacctcccgtatgtatgcattgacctgcttggcctgcgttatctggctctggcagtcactggtcgaggccaataacgatggctcgctgttcaattgggccactattgtcttctcgctgtgcttgctagtggtcatcggatggagtggttggaatgccgtcaccgggtggaacgccaaggaggctgaggctgccacggcgggtgccaaggatgatgagggcagcactgatcggtaacgtatatacggctgttgttgccgggaacatataggtcccggcaaacctgcagcgatatgtgcattgcaagccagggatcccctggcttttttatgccgaaacggaactcgacacgggcgcgcaggtcgttgggtttgtctagagcctgcatatagttacttatggtaatgactattggtaactaattggaggttgggccagcgatgtgcgattcccgaaccgataccaagaccggcttgcttccggtggatgaggtgcggagcctcctggatgtctgctggaaggccaagaccatcaccgaactgatgccggcattgccgaaaggtatgaaaccgcgctatgtccacgtgatcgacgccgtctggcatatcaacgaaccgaatgggcaagataccggcaccgcgcgcgtgggcgacgtcagcgcattcctcggcgtcactacgccgagcatcaccaagctcgtcggcgaaatggccgacctcggactcgtcgtcaaacacgccgatgccgccgatcggcgtgcagtgacgctcacgctcaccgaacgcggcttggatatccgccgcatctatgtggaggaatatcacgcgcatttgagccaactgctgggcggattgacctcggaccagtgcgaaaccacggtacgcaccttgaccgaggctctgcgactcatgcaggaagacttccaacgtcgtagtcagaatatctgaatgaatggaggagagaacaagatcgtgactcattccgcaacacagctgcctaacggcggcaagcaaccggtctccaacaaactcgtcatcgcggtcgtctcgctcgcgatcctgaccttcctcggcatcctatcggaaacgtcactgaacatcgcctactccacgccgatggaggagttctccatcggcgcctcggtggtgcagtggcttgtcaccggttatctgctcttgctgtcggtgtcgattccgagctcgccgttcatggtgcgcaaattcgccaccaaaacactgttcatcatggccatcgtgattttcaccgccggcacattactgggcgcgctcgcggtcaacttcccgatgctgctcgccgcccgactggtcatgtcgctcggtaccggcatctccctgccgcttatcaccaacatccactggcacgaagaagcgtgattccaacatgcaacgccctattatgacttcgcggtcgtttttgcgcacgccgtctgaagcggctgggcccggcgacgaggcaactattcaggacctcgtggatacgttggaggccaaccgttcacggtgcgtgggcatggccgccaacatgatcggcgtgagcaagcgcatcatcgtcttcgtggatgaagaccttggcgggcgtatcacggtgatgctcaaccccgtgatcaccgcttcggacggtgccttcgacacccaggaaggatgcctgtccctgaccggcgaacgccgcacactgcgctgccgccgtatcgaggtcaactacgaggaccgtcggttccgcgcccgccacgccaccttcaccggctggaccgcgcagatcatccaacacgaagtcgatcactgcaacggcatcatcatctgattcattcggtgctcgttgcagcccacccccccgaggctggtcatctcgattacgatgcaattacatcgcaaccgctatgaccagtttttttatgtgcactggtggggtgggtgttttcagcggtgttggggtgccatgcgctggccggttggcttcgctgaggggtgtgggtggtgtcatgttgccagcggttggctggttggcttcgctggaggttctctcagcgtcggtgatgtgccaaagagtggcgggctggcttcgctaaggagcgttaccgtcggtggagaaccagtgcgtgacctgctgccgacgctaagcgttcattaagcgtcgttagcggccaaaacttggacgtgtaacgatgctgggcggttttagtgtcgttgctgtgccaagttgtggtcctctgccgacgctgccagtgcagtagcgtcggcgttgggacaggtgttgggcctttgccgactctataagcgagggaaaatcattcgccggtgcctaagtgggtctattgccatgctgaatacatctgctgagtgtagctatgcgttcgaaggcgatttcgggacctttctcagtagcaaatatgcctaatgcgcggagttatacacttcaccgtgcacttatacacgccaaacgaagcagaaatcgactgctgacagtggacgacacgccagagacgatgtggataacccagagacggtggataacagctgcgcgatcagtggataacctgcaagaaagtgcggttatccaccgacggtagccactgttatgcacattccataccccttggaatcattgggttttccacttatccaccatctcgccatgcgggcttgcgggccaccgcacgaacgtcatacagtgtgcctcacggcgggcaacgtagcccgccgtccacatcacatgaaggggggaaacaccatgagcaccgcaaccactactactgccgaaaatgccggtttgccagcaatgctggacaccaaagacgtagccgagatgttcaaacgctgcaatctcgccgtctatgccgaagcgagacgcatatattatcgcgaagtgaatctgaacccatgcaaaaagtatccgaagcaggtgctgcaaaggatcgaatggtggttctgggattggtttgcctatgactgcgccgtcagcggtattggactgaccggcaatgaatccgaagatttacgtatcgaattgcagtacggtccgggcgcaggtatctcgccattcctagccttggccgaattcatgtatgacaaggacgaacgtatcggcacacgcgagatacgtgattttcgcgaacttgatgacaccaatttcgcttcgatgttctggattcgcgatgccagcgcggtcaaaggtcgtctgacagttgaggacatcattcatggtggtgtctacgaggtggcggacgtacatgccgcctcgcaatacgatggtgcgcacggcggcatgatcgtcaatcgcatcgcacatgtgagaggcgtgtggcgatcctgttccatcccgatctatgaggcacgaaggcctgatgacccgcaaatcggtgattcgctggcccgttcattccgggaaaccggatataaaccggactttgccggtctggtgcggtttttctacgggagggccaaagacaccggtctcgactgggaagatgcggaagccgcacgccaagctggcactttggacgcgctgatcaagaaggccagcaatcggtgaaggatccgcctaacgctgctgtccaagtcggcggccacggtcgcgaacgaagagggacgcaaccaaacagaccgcgcacacaatggcgaccgtgcggaacgaagcccgcacgccaatggccgatgccgccgcttccggcactccggtgcgcatggccgccgcggtgtgcgtgttcatgatggtgaccagcagcacagccgcagacgtcatgatcgcgaagcccagcaaggcgagcggccggccaccgatacggtcatacatcttgcctgccaccgggttcaggatgcccatggcgatgccgctcggcatcatcaccagaccggacaccagtgcattaacgccaagatcattctgcaaatatgcccattgcgtacaggaacagctggcgggtggtgaaggtctcgatgaggaacgcggtgatcgggatcatgatgccgttggtaagcatgaatccggtggtcagccattgcacggtgctgccgggcacatcgaattcatgcatcaacgtgggcagggcggagatcatcagcgtttggttgagaatggccacaaacgagccgatcatcagggtgatgaccatggcggtggtgttggcggggggtggtgctgttggagttggcggggtggtggagccggcctcagcggtggccggcgaggaattgcgtgacgtcaattatcaagtctcgttttcttggctgagttgtctttcttggcttgcccatactatctgtgccttgactgcattcgaaaaccattgcaatgactagcaacacgctgagacgcggcgtattaattcaatcatttgacaaacttagttcgttcgttttattgttggtcctgcaatccgtaatatcgcctactgcaaaggagcgcccaaatgggtctgtgggatgttgacaagatcgagtacgtcggccgcgccaaagggccgaaggaagacttcgccttccattactacgatgccgacaaggtcgttgccggcaagaagatgaaggattggctgcgcttcggcgttgcttggtggcacaccttcaaccaggaactggttgatccgttcggcaccggcaccgcgcaccgcccgtactacaagtacaccgatccgatggaccaggctctggccaaggtcgactacgccttcgagctgttccagaagctgggcgtcgagtacttctgcttccacgatcgtgacatcgcccccgaaggcgacaccctgcgcgagaccaacgccaacctcgacaaggtcgttgacaagatcgacgagaatatgaagtccaccggtgtcaagctgctgtggaacacctcctccctgttcaccaacccgcgcttcgtgtccggcgccgccacttctccgttcgccgacatctacgcctacgccggtggccagctcaagaagagcttggagatcggcaagcgcctgggcgccgagaactacgtgttctggggtggccgcgaaggctacgagaacctgtggaacaccgagatgaagcgcgagaccgaccacatcgccaagttcttccacatgtgcgcagattacgccaaggaaatcggctttgaggcccagttcctgatcgagccgaagccgaaggagccgacgctgcaccagtacgacttcgatgccgccaccgccatcgagttcctgcgcaaccacgacctgaccgacgtcttcaagctgaacttggaaggcaaccacgccaacctggccggccacacctaccagcacgagatccgcgtggcccgcgagtccggcttcctcggttccctcgacgccaaccagggcgacaagctcatcggctgggatatggacgagttcccgaccgatctgtacgagaccgtcgccgtcatgtgggaagtcctgcaggccggctccatcggacctcacggtggtctgaacttcgacgccaagccgcgccgtacctccttctacgaggaggacctgttccgctcccacatcgccggcatggatgcctacgccgccggcctgctggttgccgacaagatgaaccaggacggcttcatccagaatcttcaggccgagcgctacagctcctacgactccggcatcggcaaggacatcgacgagggcaacgtcaccttggccgacctcgaagcctacagcctcgacaagccgcagtccgagctcatcgccgccaccaagtccgatcacctcgagtccgtcaaggccaccatcaacaactacatcattgatgccctggctgaggtcgagtgaccatcggtctgaccgattgaattcgctccatcgggcgtgtacacatcaattatgatgccagtgcgcccgatgggctgattcgatagtttcgccatgtgcggtgttgtgttatgcccgcatggcacctttccattccttctttctcctttctctccttccgctggcatggagttcgagatggacgccatcgcggcctgcttcatcggcggcacggccgtcaccggcggcatcggcaccatccccggcgccatggtcggcgccctgatcatgggcgtgctcaaccagggcctgtccatcatgggcgtggacgccgcctgggtcaagaccatcaagggcctcgtcgtcatcgccgccgtcgcctacgacctactctccaagaaaaagaaaggctgagccaaacctggcctccgggcccgcccggtggccacggggatggacctgagttccattcctcctccgaaagggacgctgttgcacgcagcgtcccttttccgtttgtcgcgatggatggatcccggtgtacgttcttcgcgaaatcagccctgacttggggtgtatttcgacaatatgattcggcgatgtgcctcagcggatatgtacggccaatgaaaaacgggataccgatgtcgatatcccgctttcagcgaataggtaaggccagagcttacttcttcttggctttcttgacgcgcttgggggcgggagccgctttcttgggctcgaagaacggccacttgtgcaaagcccaggcgtgcagcgcgggaatcttggcaacggcgaagccgatgaccagaccgattaccatggcccaggtctccagatcatggcctgcgaccagcaagccgatgaacactatggcaacgatgaagctcaccatctgcgaggcctttgactgcttggcggtcaccagatcggccttcatgggaacgagccccagaaacaggccgcaaggcgcgcatatgacgcccagcaccacgctgatcacggttgacacggttgttacttccataatgttcctttgctgaagtgggatgattcgcttgattcgggcgaacgataacgatggttactggcgattagtggttggcggtgcatcggcatccgtggttgcgacgtcggtttcgacatcgtcatcggtgtcgtcctcggatccctcggcatctgcggtgtcggtatcggtaccgtcaggcgtatccgcggcgtcatcgttctccgcatcctccttgctgggttgacgccaccacaatatcaatgcgttggcggcgcagtagacggcggcaatgccgatgcataccaaaaagatgatgtttgaggtgctgatcatcgtgccatcggccattgcttctttggcggattgccatatccaaatcacgcatgcgacggcggtcagggcgtacagcatcatacgggagcggtcgttcatagaagaatctccagacttgttcaaacgacttgattatagccgtatttgtggattgcgtgggaaacgaaaaatgccgccatgtgtgcttcagcgaggagcgcggtataacagcggctcttcgcgatgcttgccatggcggcattcatcaggaatcgttattcagttgttatctcatggattgtgctggcagcgtatcagccgcgcgccttggcgtatgcctcgtacacggcttcggtgggctcgccggtctccacgccctcgatggtgagttgccaggtcagcggttcggcctcgccggacagcacccaggcggcctgacgggcggcgccgatggccacatattcgtcggtggccggacgggtcacgtccatgccgaggattgagggggccagcgtgcggatggccacggacttcgcgccaccgccaatgagcaggatgcggttgatctcggcacccagcgaacgaatcagctcgaggcagtcgcgctgggaacacagcaggccttcgacgaacgcacgagccagattctccttggtggtgttgtgcagggtcaggccagtcagcgaggcggtggcgtccggacggttcggcgtacgctcgccgtcgaagtacggcaccagggtgatgccgccggcacccggctcggccttaaaggccagttcggccagctcgtcgtagtccacgccaagggcggcgcgaccggcgtccagaatgcgcgaaccgttgatggtgcaggcaagcggcagataatgaccggtgcagtcggcaaagccagaaatcgctccggtcaggtcgtacaccgggttttcagcgatggccgcggccacgccggaggttccgagcgatacggacacatcgcccacggccatgccgaggcccagcgaggccatggcattgtctccgccgccggggccgatgatgcagccgccttcaacgtccttgccggcaatggcggggtcggccttgacggcggctgcctcacgcgggcccagcacggtgggcagcacaatggcgtcggcgtgggccttggcggcttcctcgccctcggcgggggtcagcaccatggcgatgagatcgcggcggtactcgtcatgcgcggcatcgtagtaaatggtgccggaagcgtcggaacggtcggtgaacagggcttcgagatgagcgtcctcgccctcggccaccgggccatagccggcgatacgccagctcagccaatcgtgcggcagacagacggcggcaatcttcttggcgttctcaggctcgttctcggccacccacgccaccttggtcagcgtgtaggaagcgacgggggaggatccgacggccttgacccagcgctgcttgccgcgggcggtcacgtcgtccggttcgtcgccctcggccggagttgcaccgagcttgtcgatcagggcggcggcctgcggggcggaactggtgtcattccagagcatcgcatcgcgaatcacgttgccctgcttgtcgagaatgaccatgccatgctgctggccgccaaccgcgagggccgcgacatcgtcaagcccgccggcctgctcggcggccttggtgaaggcctcccaccagaattccgggttgaccgaggtgccatccgggtgcttggcctgcccgaaccgaacctgttcgccggtggcggcgtccgtaatgcggacctttgttgattgagttgacgtatctacgccggcaaccagtactctcgtcatgcattcctcctcgatgagggtcgcgcttgcaagtctcggcgcgccacaaccaataagttagacgattaaactatactgtattgcagtgtatgattgcaaacggaaacacgcgagggtgcgtatctggttcaatcgtttgacgcacaatatcattgtgcgatagacggatgtgagcgcctgtgcggcgttcgagactaggggtgcaaggaggtaggagcctatggcaagtctacgcaggatcaatcaggaggatctgcgcaaccataatttgtcggtggttctcgacactttgttgcgcgcggagaaacccatgagcagggccgacttggccaaggaaacgggcctgaccaaggccacgctttcgctgttggcctcgatgctgatcgatagtggcgtggtgcaggaaggcgagccggtcgtctccaccacatatgggcggcccagcacgccgctggagattcatggcgggtccatcgccggcatcggcctgcagatcaacaccgatggctacggttgcctggcactcgatctgaacggcgacactctcggtcaggagtgggtgagtgaggatatgaccggcactgacccgtacgagatcttcgccaagctcgatgcgatgaccttcccgttggaaagccgactcaaacgacgtggctgcaaagtggtgggagccgggcttgcgctgccgggcatcgtcaccgacgacatgtggctgttggtggcccgcaatctgggttgggaaaacgtcaacctcacccggttcaacgtggtacgccggctggatgtggtggccggtaacgaagcgaagatggccgccatcgctcagattccggggtatgccaccgaacgtgcgtccttcctgaatgtggtggatcgcacggattcctttatttacctgtctaccgatatcggcatcggcggcgcggtggtgcgtgacggcgaagtggtgatgggctcgcacggattcgccggcgagatcggccatctgtccgtggcgatggatgggccgttgtgcagctgcgggcgccacgggtgccttgaggcgtttgcgggccgtcgcgccttggtcgaggctgccggcattgccgaggatggggatgccaccagcagcgaggccatcgatacattcctccagcgttggcgtgcgggggatccagacgtggccaaagtggtcgatcaggccgctgatgcgctggtttccgccatcgcttccgccgtgaatctggtggatgtcgatacggtgctgttgggcggactgtggacgcacttcggcgacgagctggccaccgtgcttgaaggccggctgcgttcggaaattctgggatacccgaatgtgaagatccgcgtgttcgtgccgccggtggcgctgcatccctcgctatatggcgcggccgaaatgggcttgcgacggttcatcgagaacccgttggggtacatgggggagaagtagcgccgggagatgccgcttgttgtgctggcgggtgcatggcatgggtgcatggcgcgtgtgccggcgttgatgggttcatgctacactttgcaagttggctgttttacgcagcgaacgtggggccgtagctcagtcggttagagcatgcgactcataatcgcccggtccagggttcaagcccctgcggccccactcttttgcgtcgcctcctgcggcggcacagcgcgtcttcacgtccagataggcgcgtacaatcccttaggttccggttcacgtcctgccataggggcatgacgacccgggtcccccgaatccataggagacgtaaaatgcagcagggtatccatcctgattaccaccccgttgaggtgacgtgctcgtgcggcaacaccttcgtgacccgcaccgctggcaaggaagatcacatgttcgttgacgtgtgctctcagtgccacccgttctacaccggcaagcagaagattcttgacaccggtggccgcgttgctcgcttcgagaagcgctacggcaagaagagcaagtagcatacttcacgccagtccgattcgattcggcatgctccggcatacccgatcgaggactggcgtttttgtattctttgacatttttttgacctgcacaaccgaatagacaccaccgtacgaaagaaagcgtgttatggcagacgaacagttcccggcggcggcaaccgcgcttgaggagtaccagtccatcgaagaacagatggcgagccccgaagtcgtgtccaacccggacaagctgcgcaagctgggccgtcgtcacgccgaactgggtgccatcgtgggcgcctacaaaacctggttgcaggtgaaggacgatctggcagccgctcaggagatggccggcgaggacgccgacttcgccgaggaagccaagcgtcttgaagccgaactgcccgacgccgaggagaagttgcgtaccgcgctgatcccgcgtgacccggatgatgcacgcgacaccatcatggaaatcaaggctggcaccggcggcgaagaagccgcactgttcgccggcgacctgctgcgcatgtacacccgttacgccgagaagcgtggctggagcgtgaacgtacagtccgagaacaccaccgagctcggcggcgtcaaggacgtacagattgccatccgcgccaagggcacgcccgctcccgaagacggcgtgtgggcttcgatgaagtacgagggcggcgtacaccgtgtgcagcgcatccccgtcaccgaatcgcagggccgtatccagacttccgccgccggcgtcattgtgttccccgaagccgacgaggatgacgacgagatcgagatcgatccgaaagacctgaaaatcgacatcttcatgagctccggccccggcggccagtccgtgaacaccacgtattccgccgtgcgcatgacccacctgcccaccggcatcacagtgaacatgcaggatgagaagtcgcagatccagaaccgcgccgccgcgctgcgtgtgctgaagtctcgcctgctggccatgaaacatgagcaagaggccgccgaagccgccgacatgcgtcactcgcaggtgcgttcgcttgaccgctccgaacgtattcgcacgtacaacttcccggaaaaccgtatcgtcgatcatcgcacgaattacaaggcttacaaccttgacgccgtgctcgatggcgacctgcaggccgtcatcgattccgacatccaagccgacgaagccgaccgtctggccaaccagcagtgatagccgacctgattcgtcaagccgccgcgcagttgcgcgaagccggcatcgagacgcccgaacatgatgccaaactgttgctggccgaggccgtggacgccgagctacgcgatatcgacaaggccatgctgatgggggagggcctcgattcgctggcccccgccggcgggggctgtcgcgcagcgactgggggtggtcaggccgaccccgtcaccaatatccttgccgccttccacgccatgctttcccgacgcgccaaacgcgagccgctccaatacatcaccggccacacgcctttccgctacctcgacctgcaggtgggccccggcgtctttatcccgcgcccggaaaccgaaaccgtagtccaggccggtcttgactggctgacccggcacagcatgatccacccgcgcatggtcgacctgtgcgccggttccggtgccatcggcctgtcgatagtcagcgaagtgcccggcagccaagtatgggccgtcgaattatccccgcgtaccgccgaatggacccggcgcaatctggcggtaaccgcgaaacgatacccctccatcgcctccaattaccaactggaagtcgccgacgccacgtcactggccacgctggcgcaactcgacggcaccatcgacatcgtcatcaccaacccgccctacgtgccacaaaccgacatcccggaacaaccagaagtacgcgactgggacccggaactggcgctatacggcggttcggcagacggcacgctcatccctgaacgcattattgagcgcgcctggcgcctgctcaagcccggcggcgtattggttatggagcatgatctcacccaaggcgagcgattagtggcctatgccaaggccacaggtttcgccaccgcctccaccggcaaagattggaccggccgagaccgctatctcttcgccgagaagtagccacaggcgcggggccgccgctgctactgcgcgtaatactgcagggcggaggtgtccgcgtccgtgatttcgcgaatcggacgggccggattgcccacggccacggtgtgcggcggaatatcgcgcgtcaccaccgagccggcaccgatcacgcaaccctcgccaatcgtcaccgggcaacaatccagcacagtgaagttgaagttggcgaacacgcgctcgctggcgcgcggcatacgcagttcgacgggaggcatggtggtggattcagcattgattccgctcattgaacactcctgtaatttcgcgaaagagcatggatgaactcattgtatctacggtctgtgcgtatggggcgaatcggaaaacagcagtacggcaaacgagcgatgatgaactatgcaagtcggggcgcaatggtgcaatggtagattgtgaatacacaggcgaacggaggtgtcgtgagcgtggagggcggaacaacgctgaaagtcacggatgaatcgctggcacaggcggcgcgtgtcatccgggatggtggattggtcgtcattccaacggatacggtatatggagtggcgtgcgatccgcgtaataaggccgccatcgaccgtatctaccggctcaagcgtcgcccgcgctataaggcgttgcaggtactgctcgcatccaccgaccagcttgatgaactcggtctcgacctgccgtctccactgaatcgtttgtcggcggcgttcctgcccggcgcgttctcgccgattgccgtagcccggcccgactgcacgttggagactttggccgacaccgccgatggtcgccccggcacgcagggcatccgcatccccaattcggcgctgtgcctcgcgattctcaaggccactggtccgctggccgcgtccagcgccaaccgttccggcgacgaaagcgcacagactgtccaggaggcggttgacgcgttcggcaacgaagtcgacctgtatctggacggcggtcccacccaaggccatgtctccagcaccgtcgtcaaagccgatccgtacgcgcgcgacggcatcgagatcctgcgtgaaggcgtcatcgcccaaaacgtgattcgcaaggccctccacctcaacggcgggggactcggcgcatgagaatctacctactgattgccgccatcgccggtggcgtcacctggctggtgactccgctgattcgccacgtcgccatcgaaatcggtgcggttggcgaggtgcgtgcccgagacgtgcacaccattcccacgccgcgcatgggcggccttggcatgctgatcggttttgccgtggctaccgtattcgccagtcggctgccttttctctcgggattgttcaacggcaattaccagatgtgggtgattcttgccggcggcatcatgatcagtctgctgggcatggccgacgacctgtgggatctcgattggatgctgaaactcgccggccagctgctgatttccgtattcgtggcttggggcggattgcagatcatctcactgcctttgggtggttcgctgattaccgcctcgccgagtctgtccatggcgatcaccgcattcctgatcgtcgcctcgatcaacgcggtcaatttcgttgatggcctcgatggtctggcggccggtatcgtggcgattggtggcatagcgttcgccgcctattcgtatatcatcgcccggtcttccccgagttatgcttcgttggccacgctgatcgacgtgatgatggtgggtatctgcgtgggcttcctgctgcataattggcatcccgccaaactgttcatgggtgattccggttcgatgctgcttggctatctcatcacctgcgcttcgattgtgatgaccggacgtcttgacccggcctcgattcatgccagcatctatctgccggtgttcatgccgattctgctgccggttctggtgttgttcctgcctgtgctcgacatgtgtctggcgattgtgcggcgtttggccaaaggccagtcgcccatgcatccggaccgtatgcacctgcaccatcgcatgctgaagatcgggcattcggtgcgtggcgccgtgctgattctgtggggatgggccgcgttgatcgcattcggttcgctgacgattctgttcttcaaagcgcagcacgtggccgtgggcatggccatcgctgtggtggtgctgaccatagccacgatgtacccctatctgcggcatcgtattcccgagatccaagccgagaacctgacgttcgaatccgcacgtaaaaacgcgcagcatacagtgcctaaatcgcagtctgcagtaggggagagccgggattcgattggctctcaggcagcggattcgatgactgattcgcctgcaaattcgcgggactcgcaggtgggtgaggtgcaggacccggcagcggataagtgagcgctcacaagcgtgtgtcgtgaaggtcagcgcattttcatatagtgtttacatggctacaaaccttgatgaattaaacgcccagtcggcgtatgctccccttcccccgattttcgccaagctcggccttgcctatgacgatgtgttgctgttgccgaacgagacggatgtcattccctccgaagtggacaccagcactcatctgactcgcaagatcgtgatgaaggccccggtcctctccgctgccatggataccgtgaccgagtccgagatggccatcgccatggctcgtaacggtggcatcggtgtgttgcaccgcaatctgtccatcgacgaccaggccgctcaggtcgatgtggtcaagcgttccgagtccggtatgatcaccgacccgctgaccgtcaaccccgaggtcacgctggccgacctcgacaagctgtgcggcaagttccacatctccggtctgccggttgtggacaaggacaacaagctcgtcggcatcatcaccaaccgtgatatgcgcttcatcgcctccgaggattacgacaccctgaaggttaaggatgtcatgaccaaggagaacctggtcactggcccgtccaacatctccaaggacgacgctcaccgtctactcgctcagcacaaggttgagaagctgccgctcgttgacgaggaaggccacctgaccggcctgatcaccgtcaaggacttcgtcaagaccgagcagtacccggacgccaccaaggatgagcagggtcgtctgcgcgtggccgccggcgtcggcttcctcggcgacgcctggcagcgtgcctccgctctgatggaggctggcgtggacgtgctcgtggtcgacaccgccaacggtgaggctcgtctggcactcgacatgatttcccgcctgaagcacgactccgccttcgacggcgtgcagatcatcggcggcaacgtcggcacccgctccggtgctcaggccatgattgaggctggcgcggacgccgtcaaggtcggtattggccccggctccatctgcaccacccgtatcgttgccggtgtcggtgtcccgcagctcaccgccgtgtacgaggccgcccaggcctgccgtgccgctggcgtgccctgcatcgccgacggtggcatccactactccggtgacatcgccaaggccctcgtggccggcgcctcctccgtgatgctcggcggcacgctcgccggctgtgaggaagccccgggcgagaaggtgctcctgcacggcaagcagtacaagctgtaccgtggcatgggctccctcggcgccatggccccgcgcggcaagaagtcctactccaaggaccgctacttccaggccgacgtgacctccagcgataaggtcgtgccggaaggcgtggaaggcgaagtgccgtatcgcggcccgctgaacgccgtgctctaccagatgctcggtggcctgcaccagtccatgttctacatcggcgcccacaacatcgccgagatgccggagcgtggcaagttcatccgcatcaccgatgccggtctgcgcgaatcgcacccgcacgatatcgtgatgaccgccgaagccccgaactactccggcttccacaacaactgatcggttgatgcccgctagcttgcgctagttaggggttgattccttgtgaaaagggtctgcttatgcaggcccttttcgcgtatgtggctcgagatagcttgtatgcgctggggtatagtctgaactgttctgcataagcgatgaccagcgaagaaaagaggcacaccatggtcgacagccatgacgcggaaacgtacagcgcgaaggactcgcgcctgatttggatcgattgcgagatgaccggacttgacatcttcggcggcgacgaactcgtcgaggtgtctgtggttcccaccgactttgacctgaatgtgctggacgagggcgtggattacgtcatcaagccgtccgagaaggctgtgaaccacatgaacgatttcgtgcgccagatgcacacccgttccggcctgatcaacgagtgggagaatggcctgagcctggccgaggccgagcagaaggtcaccgaatacgtgctgcgcttcacgccggaaggcgtgcgcccgctgctggccggcaacaccatcggctccgacaagaagttcctcgaccactacatgccgggcctcatgagccacctgcattaccgcagcgtggacgtgagcaccttgaaggagctcgcccgccgctggtacccggccgtctacgagaaccgtccgccgaagaacggcggccaccgtgccctcgccgacatcatcgagtccttggacgagttgcgctactaccgtaaggccttcatggcccccgtccccggcccggatgatgccgcctccaaggccatcgccgccgacatcgtggccaccagcattctcaataagtagtccgccgtacttggctcccctccctgaggggagtctagagaggttgatatgcgccaaaccgaagccctagccattctgaacgccggcgcgaacgtgtttctgaccggtgcgcccggtgccggtaagacctatgtcttgaacgagttcatccgccaggctcgggccgacggcgccagcgtggcagtcaccgcgtccacaggcatcgcctccacgcatatcaacggccaaaccatccattcgtggagcggcgtcggcgtggccaccgccctgagcccgagtctgctcaaactcatcaaatcccggcgcaaacgcaagattcaggctacggacatcctcgtcatcgacgaggtctccatgctgcacgcatggctgttcgacatggtcgaccaagtctgccgcgaagtgcgtcgcgacccacgcccgttcggaggcatccaggtcgtgctgtccggcgacttcttccaactgccgccggtttcggtgtccgggcgcaaccgcgacctcatcgcccccacccccgaattcatcgccagtcgcgaacggtatgcccgtgccggcttgaaccccgaaggcttcatcaccgaatcgctggtatggcccgaactcaacccggtaatctgctatctgaccgaacagcaccgtcaggacaccggcgaactgctgaccgtgctcaccgacattcgcgaaggcgacgtgacccagtccgaccgtgacgtgctcgtcacccgtctgggcaaactgcccgagcccggccaggtcgccgtccacctattcccggtgaaccggcaggccgacaatctcaacgacatgcgcctgaaccagatcatgcttgagccgcacgagttccacgccgaaaccgcgggtcccgccaatctggtcgaccgactcaaaaagaacatgttggcccccgagcgattgatactcaaggaaggcgcggctgtcatggccctgcgcaacgacaccgatcgccagtacgtcaacggctcgctcggcaccgtgcgcggcttcgcgcaggagaacaagggcggctggccgatcgtggaattcgaaaacggcaacatcgtcaccatgaaacaggccacatgggaaatgatggacggcgacaccgtgctcgcctccgtctcgcaggtgccgttgcgttgcgcgtggggcatcaccatccacaagtcgcaaggcatgacgcttgatcgtgcggtcatggatctgaagcgcaccttcgcgccgggcatgggatatgtggcgttgtcccgcgtcgaatcgctgggcggactgtatttggctggcgtcaacgaacgcatgttcctcgtctcgcccgatgccgtggtgctcgacggcgacctgcgcgaagcctcggcctcggcttccgaccagttggccgatgaaggtgcaagcgcgttcaaacccgccgagccggacgaattcggtgtcaatcccgatgatgacttcgcccaggacgcgttattctgacggtcgatatatcgaacgaccgctaatttgagtgtttctgcacttcgaggggcggattttgagttttcgggacatctacttccgtttcaaggggctgatgtccaagtagacaacgcttaaaaacggcggaatgacgttggtatgaagccgtttctatgtgcgattgagcggatgaccagcccctcgaaacgcaagtagatgtctccaagaggcggaatcggccccttgaagccgaagaagacactgcgaacttgtcttcattgaggaactgaacggctaccatggaataagaggtggtagttatggtgctatccgagatatttcgtggaaacaatgaggttcgcgaggccgcccgggccggtgtgcaaatcgatacggttagtgtggctagtgcgtcagatgcagcaagcgcggcagacggcagcggcaaaatcactggcgcaatacgtccgccagcggtggctggttcgttctaccccgctgaccgcacaacgctcaagcaactcattaaccatcaattggattacagtcgagaggttctgcaacagttggagcccacgcttccagcgggagtgccaaaggctgtaatcgtgccgcatgccggttatgtgtattccggcacggcggccgcgcttgcctatgctttgctcgaacgagggcgggggagtgtgactcgcgcggtaatcgtgggaccgactcaccgtgtggccgtgcgaggcgtcgcctgttccacggcagcggcgtttgaaacgccgctgggcactgtgccggtagacattgcagccgagcgtaaggctctgggcctgtctgtcaatgagccattgcgctccggtacacatgcccgtccgggcgcgtcggctcccgcaatgatcgtcaatggcccaacccacgcacaagaacatgcggtagaagtgcagattccgttcctgcaaaccgtgctcggcccagacctcactattgtgccgttgaacgcgggcgatgccacgccacaagaggcgggtgatgtgttgcgtgctttgtggggtggcccggaaaccgtcatcgtgattagttcggatctctcgcactatcatccgcacgaagtcgcccgcgcgttggatgaccagaccattgcggacattgcggctttgcatctgccgattcaccctcgccgggcctgtggcgcatacccgatcaacggccttctggatgtgttaaaaggccgcaaggacatgaagctcttcgagctcggctgttccacttccggcgacgacggcgtggtggcgcttgccggccaacctcgccccgcaatgcgagacgccgacgagccggtagtgggatatgtctcgtttgccgcgtgggaatccaaaccggaagcagatgctccagccggtgcagatgacttaggcgaatcgggaacagcccatggtgatgtgctgctgaaactcgcccgtgccgctatccgggaacggttgcatatcgagcatccgaccgccgctgattcgaccgcgtccattcttgccgcaaacccgtggctgaacgagtccggtgcctgtttcgttaccctgaccgagggtggccggctacgcgggtgcatcggttcgctggccgcccaccgctcgctcggcaaggacatagctgcacatgcggtggacgccgccacccgtgacccacgtttcaacccggtcaccgccgcggaatacccgttactcaatgtggaaatatccgtcttaggcgagcccgagccgattaccgcgaactcctgtgacgccgattcgcgcgataccggctcgaagaccgcgactctggcatcgctgcaatccggacctcagaccgacgccgtcaaacgggacggcagcaacgtcgaacgcccggtacgttcgcgcactgaacttgaggaagtattacgccccggcaaagacggtctgattctcgccgaccgtcgtggctgcagcgccacattcctgccacaagtgtgggatgagctgcccaatccgcacgatttcgtcgctcacctgctcgccaaggccggtatccgcccgtcctacgactggaacgatggtgaaatcgactgtcaacgctacgaggtgaccgcctatgccgagcactaacgcagcaaccatgtcccctcccgctggcgggaggtggcacgaagcgacggagggtggtcaccgagaatcagagggtggtcaccgggaatcgtgcggtcatacggcgtcagtcacagatgttcgtaaccccgccatagcccgctggcaaacgcaattccacgacggtaccaaccgcgctcgctgcgaactatgcccgcgccgctgcgtcctcaagcccggccaacgcggcttttgcttcgtccgctcaaaccacgacggactcatcgtctccgacacctacggccgcagctccggcttcgccgtggacccagtggaaaagaagccgctcaaccacttccaccccggttccagcgtgctgagttttggcacggctggctgcaattccggttgccgattctgccagaattgggatattgccaaagcccgcagtttcgaccggctcggcgtggaagccagtccggagaaaatcgcgcaggtcgcggccgaccggggcatcgattcggtggcgttcacctataacgatccgatcgtgttcgccgaatatgccatcgacacggccgaagcctgccgagcgctcggcattcatcccatcgccgtgactgccggatacatgagcgccgaagcccggcccgacttctacgccgccatggacgccgccaacatcgatctcaaaggcttcaccgaagaattttattggaaagtgaccggcacgcatctggccgatgtgctcgaaaccatcgactatgcggtcaacgaggcacgcacaccagaaggcgaacacgtgtgggtggagctcaccacgctactcatccctggactcaacgatgacgacgcccagctgcatgctgaatgtacatggatacgcgagcacttgggcccggacgtgccgctgcacttttccgcattccactccagttaccgcatgatggacgtaacgcccaccccgcacgagactctgacccgcgcccgaggcatcgccctcgaagagggactcaattatgtgtacaccggcaacgtgcatgatcgtgaaggcgataccacatattgcccaaaccctgaatgcagggccaagctcgtggaacgcgattggtatcgaatcattgccaaccgtttatctgccggatacagtggcaatgggcactgccccgtatgcaggactgctatcgccggacgttggtaatctgcctcaggtcgcccgcgcgatttagcgcagatcgccaatacgcgcggcgatcgtcctcatcgatttgaggctcgcctcatagcgcgcggctgccacaatcagaatgatgccgcccaaagcaagccacacccaccggtagtggcgggagaattcggcccgccatggccacagcacagtcaccgtgctgacgataagaatcaccgtgccgtagatcaacggtgcttgcagcaaacgcacacccacaatcagcgcggccgctctgggtaggccgattgttccgggaccgacataggcgattgcacaaatggtggcatggccattggctgttgcgataccggttgtcgcggaactgccgttgggaattgcggggttgcagcagaaaattgcggggcccatgctgggccggttgatacaccggttgctccgcgggttccggctgattcccctgttgctcggtcggctgcgtcatcgtgccctcctacccttctagccatcattgttgtacgaatgagtccgaatgccaagatgaaggccggaatagtgcgaatagcaggcgggcttgtcggttcacgcgaatatcttggaacacatgacttccaatacccttcgtatgtcaaccatgttcctgcgcaccctgcgcgaggaccccgctgatgccgatgtcgattcggccaagctgctgcagcgcgccggctatatccgcaaggccgcacccggtatctggacctggctgccgctcggtctgcgcgtgctgaacaagatcgaggccatcatccgcgaggagatcaacggcatcggcgcccaggaagtgcacttcccggccctgctgccgcgcgaaccctacgaggccacccatcgctgggaggagtacggcgacaacatcttccgtttgaaggatcgccacgaggccgattacctgctggcccccacccacgaggagatgttcacccttctggtcaaggacatgtactcctcttacaaagacctgcccgtcaccctgtaccagatccagaccaagtaccgcgacgagttccgtccgcgtgccggcctgatccgtggtcgtgaattcatcatgaaggacgcctactccttcaccatcgatgaagaaggcatgcgcaaggcctactatgacgagcgcggtgcctacgagcgcatcttccagcgtctcgacctgaagtacgtacctgtgttcgccatgtccggcccgatgggcggctccgcatccgaggaattcctggctccgatgccgatcggcgaagataccttcgcgctggcaccttccggcaaggcatggaatgtggaggccctgagcactccggagctgccggaaatcgatgcttccgccactcccgccgcttccaaggaagccaccccggatgccaagaccatcgataacatgattgagcgtgccaacgccgaccacccgcgtactgatggccgtgaatggcaggcttccgacatcctcaagaacgtggtgattaccgtcaagcaccctgaggatgaagagcatgacgagccgtggcgtgaagtgattgtcgtcggcgtgcccggcgaccgtacggtggatatgaagcgactggaagcccagttcgctcccgccgagcttgaggaggccactgaagaagacctgaagcagcaccccgaactggtgccaggctacatcggaccgatggtgcttggcccgcaggccgaggctgctggcgtgaagaacccggttcgctacctggtcgacgcgcacgtggtcaagggttccgcttggttcactggtgccgatgagaacgaggtcgactactacaacctggtgtacggccgtgacttcaaggccgacggcgtggtggaagccgttgaggttcgccacggcgacatgagcccggatggttccggtccgttgagcttcgagcgtggtgtggaaatcggtcaggtgttccagctgggtctcaagtactccaaggcgctggacctgaaggtgctcgaccagaacggtaaggccgtgccggtgtggatgggctgctatggcatcggtgtttcccgcgtgctggcctgcatcgccgaaacgcaccacgacgaagccggcttggcttggccgtccgtgattgccccggctgccgtgcacgtggtggccaccggtaaggacgccgtggcgtttgaaggtgccgagaagctggtcgccgagcttgaggccaagggccttgaggttatttacgatgaccgcaagaaggtgtctccgggcgtcaagttcaaggatgccgagctgatcggcgtgccgctggtcgccgtggtcggccgcgattacgtcaacgacggcaccatcgaactgcgcgaccgcaacggcgaaaacaaggtcgccgtgcccgccgccgaagccgccgacgcgctcgccgagcgcttcgccgccctcagctgagtcccacttactcagcctcggcgttaatcgcatcaagcgccattctgcccagtcgcagaatggcgctttgttgtggataaccgaaacttatccacattcttaaaatttcaactgcgtcacagtatccacatttgccagttgcccttgtgcgcttcaaatgccatgcctcacagtggaggtaccgctggggcgtgcaagccggcaatgaagccggagacaggctccggcggtccacatccaaacaacaggccagcaggccgaggaaaggaccgatcatggcaaatcaacaagcagcagtgaccgtcaccggctttgtggccggtgatccgacactaggcggaactgagagtttccgcgtgctgacattccgtatgggcagcacccgcagtcgactcaacccgactaccagacaatgggaggattacggaaccgcatgggtgggcgtcaaagcgttccgtgctttggccgtgaacgccgccagttcggttcgccgcggtgaccgcatcattgtggtcggctcactcatcaccgagcagtggaccaatgagcaaggcgaaccgcgcagcagaaccgttctcgaagccaccaacattgggcatgacctgaccttcggcaccacgtcgctgatcaagccacagcgtgccggtaatgggaacggaggcaatggtggcaacggtaacgacaatgccaatggtgccgccgaaggcatggatggcggaaacgggcaacgagcatcgtcaccgcacatgaggccaacgcaatatagtgtggacggtgccgcatccggtgtgggcattgacccgtatgcgacctcgtcggaatctggccccgtcgaatttggggtcacctccgattccggccaatcgccgtcgccatcaaccgagtcagcggctgcgtccatggccgatgccgtcatgtcgcaaccggacgctggcgctaatcagccacagtccgcagcccaacaaacctatgtcgacggtttcgccgaatcttccgatcccggcgaatccgaattctgagtgccaaccatacatcatgaaaaaccgctgtgttcgcctgtaatcgaggcaagcacagcggttttctcttacataacggggattaccaaatgctcacacggtccttgggcgcgagccacatggcgtcgccttcggtcacgccaaaggcatcgtagaagaggtccacgttgctggcgatgccgttggtgcggaattcggctggagaatgcgggtcgatctgcaggtactgttcggccagctcgtcgcggttcttggtgcgccagatggaggcgtagctcaggaagaagcgctgcaggccggtgaatccgtccatttcgggggcggtatcgagcagtgccttgatggcggcgggggagccgtcttcttcggcgtcgggcttacctgccgccttgccgagcgcgaatgcatacgccttgagcgcgatgttcacgccgcccaaatcgccgatgttctcgccgatggtcagcgcgccgttcacgtgcggcgccttatcagactcgtcagcgtacttctctgccagctgcagcggcacaaagctgttgtactgggcgatcaatgcgccggtgcgggcctcgaagttcttgcgatcctcgtcggtccaccagttgttgagcttgccgtcgccgtcatactgcgaaccctgatcgtcgaagccatggccgatctcgtgtccgatcactgcgccgataccgccataattcgccgcatcctcggccttcgggtcgaagaacgggggctgcagaatcgcggccgggaacacgatgacgttcatgctcggctcgtagtaggcgttcaccgtctgcggattcatcagccattcgtccttgtcgaccgccttgccgaccttggccagctggtagccggtctcgtacaggttcgcggccttggcgttctcggcgggcagcgcatccgcggagacactcagcgccgaataatcgcgccagtggttggtgtagccgatcttcggcgtgaacttggagatcttctccagagccttggccttggtatcctcgcccagccaatcggaattggtgatggacacgcggtaggcgtcaatcagattggcgaccagctcttccatgcggcgcttcgagctttcggggaagtgcaggcgcacgtattcgcggcccacatcttcaccacaaacgccgttgaccaggctcaccgcgcgcttccaacgatcgcgctgcttcttggcaccggagagcaccttgccgtagaagtcaaagttggtggtgtcgaagtcgcgagacagggaggaggcgaagcccagaatcatgtgaacacgggcccacagcttaaggtcggccagatcggccttggcccagaacgcatcaagaccagtgaggaagctcggctcgtgcacaatgacgcgcgcgaacacagacttgaaatcgatcggctgagccttggcggccttggtggcgtcataggcggtctgccaggcgtcgatccaggaaccgagatcgaagttcttcagcgtggcggccaaatcggcgtaatcggtggggttgtaggtcttcaccgaatcgcgcgtggccacattgtcccaatgattggcggcgatcttggtttccacggcaaggaagtgtcgggccatatcaagtgcggcttcgctgggaaccgtggtgggagcattgctctcgtcatcgccggtgttggccggcagttcatcgccaccgttggattcggcggcgggcgcgtacccggcgttcaccagctgggtggcgaccatcgccacgtatgcttcgcgcacgggggcgtagtggtcctcacgatagtaggcttcgtccggcaggcaaaggccggcctgctcaaggtgggcgatattgcggtccgggtcgccggggtcgccgtaaacggccaagccgaacaggtcggggccgccggctgggttgatggtgccgagcacgcgcgtgagagcggccttgtcgatggcggaatcgatgaggtcaagctcatcgcggatcgggtcaaggccggcggcctcgatggcgtcggtgttcaggaacgaatgatacagagcctgcgatttggtggccgggcagtcgtcggcgtcgaggatgtcgcgcacttggttttcggcgtcttcggcgagcttgtcgaaggagccgtagcgcgaacgatcgtcgggtaggcggtaggtgtcgatccatggaccattcacgtagcggaacaggtcattggtcggcttgatgacggaggagaacgatgccgggtcgatgcccgacgtcagcgtttcggtttcgttggtcatggccctaagcctaatcgcggcgggggagaagcgttggtgatgcagatattgcgttatgggtattgcgctgtcagtgaactagacggattgcctaactgtagtgatggttcaaattaggtaacttgcctaacatggtatgtggaacctgaatatggaccttgagttaaggagttacgatgagcaatccaaacgagggtcagtggaatggccagacgggccagcccaaccagagccagccgagccagccgaatccggcgggccaaccgggccaaccgcagtatggcgcgtatgacagcaatcatggcggccaatatcctccgcaaggtgcgccaggagcgcaagacactcagaatcagcaggcgcagaacggccagccacaaggcggaccgaaccagaacccgtactacggcccgtacgcctacaatccgaactatggcccgaacggccagccagcatggggtccggacggtcggcggtatcaggcggacggccaatcgaatagccaagcggacgggcagccgaatggttcatggggcgatcaaagtcaacccggctggcagcagaccaactggtatgtcggcaatttcagtccattccacctgatcgaggaatggctgccggaaaaggccaagaccaagattcgcatcatttacggcgtggtgggcgtggctgccatcgccttgggcgctgcgctgttgttggtgccgaacaagacgctggctttggccgcattgttgctcggcgtgtatttcgtgatttccggcgtggtgcgcatcgtcagcgctctcgtggagccgggtctgccgggcggctggcgtgtgctggacgtgttcgtcggcattctgctgaccttcggaggcgtcgtagtcgtacgaaactacggtatgaccggtcagaccttggcattactcatcaccctgatggtcggtttcggttggattatggaaggcgtgatggctctagtcgaatcatggcgcatcccgcgctccggctgggccatcgcctatgccatcatctcgattatcgccggcttcgtggtgctgatgagcccgctgagctccgccgtattcatgattatcttcggcggatgtgccatggtggtgatggggattacttcagtgattcgcgcgttcacttttggcaagcgtcgcaagtaatctcgcgctccagacaatcaatctccggacaatcaatccaaagcgcccgtgcaggttatgtatctgccgggcgctttttctcggccttggccgttgataggctactagcggaccctaggcagaccacgggtgatgctctggcggttgaccccgggctgggctagagttgagaacaagtctcaacaaggtagaaagaacctcatgatcgaattgaagacccctcgtgaaatcgaggaaatgaagccggccggccgtttcgtcggcggcattctgaaggaactgcaggagaccaccaaggtgggcaccaatctgctcgaaatcgacgagttcgtccacaagaagatcgtggaccgcaagggcgccgaatcctgctatgttgactacgctcctgacttcggcaccggcccgttcgcccactacatctgcacctccgtcaacgacgccgtgctgcacggtgtgccgtacgattacagcctgaaggacggcgacctcgtctccctcgatctcgccatctccgtggatggctgggtggccgattccgccgtcagcttcgtggtcggcaaagacccggaccccgaagacctgcgcatcatcaagtgcactgaggaagcgctcgccgccgccatcgacgtggccaagcccggcaaccgtctcggcgacatctccaacaccatcggcgacgtcgcgcgcgaatacggctacccgatcaacctcgagttcggcggtcacggcgtgggccacatcatgcacggcgacccgcacgtaccgaacgacggccgcgcccaccacggctacaagctgcgcgaaggcctggtcatcgccatcgaaccatggttcctcaagaccaccgacgagatcttccaggatccgaaggacggctggaccctgcgtgcctccgacggctcgcgcggtgcccactccgagcacaccatcgccatcaccgagaacggcccgatcatcttcaccgatcgtaccaacctctgatcggtttatctctgtttggccaggccacttttcccatgtggcctggtcttttctgtaaccgtaatgcgactatcatgatgaggcaagggggtccgtgtggaatgatgggatacaatcagtgggtatcgttccgaagtggggccgatgccggattgttctaatgcgtacgtattcatggggttaatccgggtgtgaaaggtggaggacatgagtggttcggcccgatcggggtctttatcatcgttgcgtcaagccaatgtcaaccaagtattgaaggtgttgcagcgtttcggtggtatgacccagattgaacttgccgacgctacgaacctttccgccgccaccatatccagcattgtgcgcgagctgaccgaaaaaaataaggtcgttactaaatccgttagtcgtaataatcgacacgctctgtatgtgacgcttgctcaggagggtggtattgcggcaggtgtatccatcggcaccttggacttgcgcattgtgcttggtgatagctccggtgaggtattgtgcgaaaagatgatgccgttacccgtccgacatcagccagacagtacggtgatttgcgctctggaactactgcgagagatggttgaactggtgggctctgaaatcacggatctcaagcaggttaccattgcattgccggcacccattgatctgaacagtgaggtgcgcgtaccggaaataatgcacggatggagtggcaaggagattgctgatcgcttcgagcgtgggacaggggtacacccggtcatcgagaatgacgctaagatggcatgcctagctcaggtgcacgatccagggctgcgcagacaggatgtagtttacgtcaacgctggatatgaagtggggggtgctctgtacatcaatggcaggctttaccgtggccatgatgggttggctggcgaatttggccatattcaggtcgatcctaatggtgccgtatgtacctgtgggcgtcgcggctgtctgaacacagtggcttctgctgcgcatattatctctctgctgcgtccttcgcgcggtgaaatgagccttcgtgacgtggtctctgatgctaagcgcggcgatttggtgtgtatgcggctgattgaggatgtggcgacacagattgctctggctattgagccggttatcactgctttcgatcccggcgtggtcattgtgggtggcgagttgacacaagcgggcgacggttttctggtggcgctcagtcaagcattgaacaaggtgatgttcccggtgctttcggatcgtcgcatcattcttggtcagtgtggcgacgatgcggtctcattgggggctatgtattccgccgccaatcggattattatgggtagtgattgattctttccgtatatgcattgtgatgagtcgtagaagacgagatgaacagtgagggaaactgatggtggtacaagcagcaggtatcgcaatgatcgattcctaccgtggtatgcgcaaggttgtgttcgggggcagaggcctttgcaaaacctacggatctgttaccgcgcttgatgacgtggatattgacgtctacgagcgggagattgttgcggtcgtaggagacaacggtgccggtaaatctacgctggtccgtgtgctgagcggcttggagtatcccgatgatggttgtgtattgtgcaacggtgaggaaatttcgttttctggtgtcaaggatgccaacgccgctggcgtatgtaccatctttcagaatcctgctatggcgccggcgatggatgtggctgacaatgtgtttatgggccgtgaacgtatgcgaggcctgtttatagacaaaaagcgcatggtggaagacactcgtggagtactcaaacaactgggctccccactgtctcccacaagaatggttcgcggtctatcagagggcgaacgcaaaacgttgacattcgcccaagcactattagaagacccagatgtgctgatcttggacgaaccgacgagctctttgtcggtgattcaaaccggcgaggtgctcaaccagatgctcagcatgcgtgaggcaggtaaatcgttgattacggtgtgccataacctgactgatgtgtttgcgatttccgatcgcatctgtgtgatgaggcatggaaaggttgtagctacgctgaatacgcgagagaccacctatgaagcggtggtcgggtatatggcaggggttccgcagcgagcctaatataggtcgaggtcattgtcgttggattcagactgtgaatccactcgttctggcttcttgttgcggtttcataccgctggctggttttgtattgttttcgtatctgaattcatggatatgattttctgatataaatttacgataataaattcatcgaatttttgttaagacgttgcaatttcatggttttggtcggcgtgtcgctggtttgccaagaatcccttgaatatgtattctaaattcaagaacaacaaatcaatcaacggtgatgtcctccaaccactcagtgatgagcgtaaaggaagcctgtaactctggttaattcggtgttcttggcgaacttctgaagatggcaatactttcggatttcgtctggtaatagataagagacacaaattgaaaaggtgagtgaagatgaaggttctccataaagccgcagctgttttctccattgccgccctcgccgtagcgggcttggctggatgcggaaactcttctgatggatctggcgtcgccacctcaggcgactcgaacgcgaagatcaagattggttatgtgccttccacgatgaacaatcccttctggcaagccattcttgatggcgtgaacgccgaggttgagggcaagagcgtgtccgtacaaagcgtcgatcctcaggccgaccagtccaagatgaacgacatggtgggtgatctcattgcctccggtgtcgatgcaatcattcttggcccgtatgataccaccggtgttcagcccgcattgcaggccgctgccgatgcgaacatcccggtcatcaacattgatacccctgtcgatgatctagatttagtcaagaccgttgtggcctctgataaccccaaagccggcgaactggtggctgaagacatgatgaaaaagattgacaagggttctgaaatcgccgtcatcaattgtcctgctggccaggcatgcatccagcgccttgaaggcttcaaagaaaaggccggtgactactttaacatcgtgcaagagctggatggcaagggcgaactcgccacttcgctgactctcgctgaggatattctccagtccaaccccaacgtcaaggcgattctgggcatcaacgatccgatggcattgggcgcagttcaagccttagccgctcatcccgagatgagcgatgtactcgtctatggtgtcgacggttctcctgatggtaagcaagccatcaaggacggtaccatgacgggcaccggcgcacagtctccggacgaaatcgggcacaaggctgcgaaagccgcgcttgacgtgattgatggcaaggagatcgaaaagaacatcgtggtcgacacgttcttgattaccaaggataacgtggacgagtacggcacagacggctggcagtgacgcgtaaatagtgtcatcgtcagcggctgatcgcgatgtcttctccggtcgcggttagccatcacacgggacggaagctacagaaacacgtccactttcctcttccttggagcagcttcatcacttccgtcccgtttttcatttttttttctttcgcaaaggattacgcaatggtagatcagatggtagtagacgccccttgcgtcgataccgcccccgatgccggtgccacatccgccccgaccgcaatgggcaaggtcttcatcgatatgacggacatcgttaaaaccttccccggcgtcaaggcgctgacggatgtgcatctcactctgcattcgggtgaggtactaggcctgctgggtgagaacggcgccggaaagtccacgttgatgaacgtgcttggcggcattttcaagcctgacagcggtagcattcgcatcgatggtgaggatgtacagctgagtggcgtactcgacgcgcaggctaagggcgtggccttcgtccatcaggaattggcactagagccattcctgaccgtggcggagaacgtgttcatcggccgtgagctcaagaacggggctggtttggtctcacagcgcgagatggtcgaacagtcacgccagtatctggaaatggtcggtcttgacatcaacccgaacacgcttgtcaactcgctaagcatgggtcaacagcaaatgattgagatagcgaaggcgctatccctgaactccaaggtcatcgtgcttgacgagccaacttcgtcgctttcggagaaagaagtagatgacttgttccgcgtggtacgcaaacttaaagcgcgcggcatgggcatcatttacatttcccacaagatgagtgagattttcgatttgaccgataacgtcatgattatgcgagatggcacatacatagacacggttgtcaccgctgaaaccgatgaggaccagctggtgcgtatgatggtcggccgcgatgtagagaactactattaccgtacttacaacaagcccggtgccgtcgcattgtctgtatccgactactcatgcgctccttggtacaaaccggtcagctttgaagtacgcggcggcgaagtgctgggattctatggtctgatcggctctggccgttcggaattgtttgaatccattatgggcttccgtgtcggcggcaaaggcactgtgacagtcttcgacgagaagattgaaggtaagacgaacccgttgcagatgatggataaaggccttgccttggtgcccgaggaccgaaaaactgaaggtctgtttctgttcagcgatatcaagttcaactcctcgatcgcatccttatccgaatttatctccaagctacgcgtcaatgggcgtaaagagcgagaaatcgctgaaaatgcggtcaagaccctgaacatcaaggtgccttcactggaatccaaggtcggtaatctttctggcggcaaccagcaaaaggttgtgctgggtaaatggctggctaccgatcccaagattctcattctcgatgagcccacccgtggcatcgacgtgggtgccaaggcagaaatctacaagattatcaactccttggccgccagcggcgttgccgtgatcatgatttcctctgagctcaatgaggtgatgaatatgtccgatcgcatggccgtcatgcgaggtggtgagattagcgccatcttgcagcgcgacgaattcgaacaggatgcaatcctcaagcacgcgctcggctgatgagcctggcgcaaacagtgacccaaatacggtacttacaaggaaagaaacatgaaaacgcaaacaaaagtcctcgataagctggaggacgctcccgtcatcggatcaatcgctaaggtcatcaaggcgaatatgggcattctcatcggcttcgttgtgctgctggtgttcctgagcatcttcgccgagaatttcctgtcttgggcaaacattgttaatctcatgcgttcggtatccaccaacgcaatcctcgccatcggcgtgatgctatccatcatgctggccggcattgatttgacctgcggcgctttggtggcattgtccggtgtggtggccgtattatccatgactcagttcggtctaccacttccagtggcgctggttgccggcactctaattggtgtgattgtcggtctggccaacggcgtgatcatcgcctacaccggcattcatccattcgtcgttaccctggccatgcagagtatttgccgtggtgccgcgtatctggctgccggtggcaagcccgttaccgtgcgttctgaggcctttaccacgctgggcaatggctaccttggcccaattccgttgccggtcatctacatgcttgtactgttcttcctgctgtacctgctactgaacaagacccgtctcggccgtcatatctacgcacttggcggcaacccgaccgcagccaagtactccggtatcaatgtcacccgcgtcaagatctttgtgtgggccgtctccggtctgcttgcttccttcgccggtgtcgtgctggcctcccgcatgtcctccggtcagcccactgccggtgttggttatgaaaccgatgctatcgccgctgccgtcattggtggtacctcaatgtatggcggtgtaggtcgcacctctggtgtgttcatcggtgtgctcatcattggcatgatttccaatggcctgaaccttatgcacgttaactccttctggcaatacgtgattaagggcgtcatcatcatcgtggccgtgtacttcgatatgcgcaagaacaagggcaatgtgcgtaccggcttctagcctccgatcaattagcggcatgccagacatgccacaggtaaccggccgtctggtttccttccaactagacggccgattccgcaccttattttcttctcatgaaagagcaacaatgaactacaacacacgaatcgagctggaactcgttgcggccaagggccgccgcagtgccctcggcatggttcaggcagtacgttccggccatctgggcggctcgctgtccgtcatggatatccttacggtcctgtatttcgacaaaatgcgcgttgatcccgctaatccgcatgatgcaaatcgtgaccgttgcgttctgtctaagggacattgcactccggccatgtactcgatactggccatgcgtggtttcttcccagttgaggatctctccaccttccgcaacatcgattcctacttgtcgggtcatgttgaaatgacgaaagtgcccggtgtagatatgtccgctggttcccttggccaaggattatccgcggcactcggcatggcgctcgcagcccgtatcgatggcctcgactaccgcgtatacgctatctgcggcgacggtgaaattcaagaaggccagatttgggaagccgtacaaatggccgcacactacggcgtaagtaacttgacggcttttgtggataacaatcgcatccagcttgatggcttcaccgaccgtatcggtggcccctccaagacggtggacaagttccgcgcctttggctggaatgccatcgaaattgatggtcatgacgttggtgagattgctgcggccattgatgcagctgctggcgtacgcaccgtgcccaccgcaatcattgctaacacggtcaagggccgcggtgtggactttatggaaaataatcccaagtggcacggcggcacaccgaacgacgaggaattcgcctctgcctttgctcagattgacgcgcgcatcagccatctggaaggtctgaagcaatctgttgcatacaagaccgccgtatcgaagggagcaaactgatgagccagccaaacacgaacccagtatctacccgtgtgtcctatgggcacgcactgtgtgaattgggaaagaacaatcctgatgtggtggtagttgacgccgatttgactacctgcacgatgacttgctattttgcacagcagttccctgagcgtttcttcaatggtggcatcgccgaatccaatatggtgggtgtgggtgccggcttggcgtccactggcaagactgtgttcgtcaattcttttgcgatgttctctgccggtcgagcctatgatcaggttcgtaactcggtgtgctacccccatttaaacgtcaaagtggtcggcacccatgccggactttcggttggtgaagatggcgcgacgcaccagtgcatcgaagacatctccctgatgcgtacgattcccggcatgaccgtgattgtgccggccgatgctgaagaggctcgacatgccactttcgcgatggcgacatatgagggaccatgctacctgcgtttgggtcgctctccggtacctaccgttacacgagatatacccggttaccgattcgaacttggtaaggcggcgacactgcgcgatggttcggacgtaaccatcatcgcctgcggattaatggtgggaaaggcgcttgaggccgctaagacgctggagaatgaagacatcagcgcacgcgtgcttgacatgcacaccattaagccgattgaccgagatgccgtgattgccgctgcacgagagaccggagcaatcgttactgccgaggaacacaacgtgataggaggtcttggggctgccgtgtctgaggtagtaggcgaacaagcctcggatctgcgcgtgccggtggtcaaggtcggagtcgaagatgtgttcggtcattcgggcagtgctgaagcctgcttggaaaggtacgggctgaccgtcgagcatatacgtgacgcggccaaacagtcgtttgctatgaaatagccaaatatcctatagaaagtgtcgaattcccgcgaattcgagacgtaacaagccgaagtgcgtttgctttgatagcatgagcgcacttcggctttcgtgtatcgaccggtgtctgccggcggtaacacagaagacataaagtaccgaacactagcgttcgcgaacgcgtgaacgttaatgtttggggtaagtggttcatgaagaggaaggtgcgcgaatggcaacggcacaacttgatgtcgattcgaacaagttcaacctgcccgtggtgaaggctagtgcagggccggatggcatcgtcgtttccaagctgcgcaatgacggctgggtaacgctcgaccccggattcctcaccaccgcacagtgcgaatcgaaaatcacctacatcgacggcaagcattcgatcctgcgctaccgtggctaccccatcgagcagttgtgcgagaactccgattttctggaagtggcgtggctgctgcgccacggcgagctgccgagcagggctgagtatgagcagttctgcgcggacatcaaccacaagacgatggttggcgaagacttccgtaccttcatgggttcgttcccgcgctccgctcatccgatgagcgtgcttgcctccgccatcaatgcgctggccacgttctatccggacaccaccgatatctccgacaccgaccagctcgatgaggccgccaagatcatcatggccaaggcccgcacgattgtgtcgtacatctttcgccgtcgtcgcgatgagccgatgctgtaccccgattacgcgcgtggctatgtggacgacttcctgcgcatgtgcttcgctgtgccgtacgagccgttcgaatctgacccgttgtatgtgcatgctttgggtcgtttgctgattattcatgccgatcacgagcagaactgctcgacctcggtggtgcgtatcgccggttccgcccacgccaatctgtattcggcggtggccgctggcgtcaatgccttgtccggaccgttgcacggtggcgcgaatgaggccgtactacgccaattgaaggcgattcgtgattccggtaagtctgtggccgagttcgtgcgtgatgccaaggaggatggccagaagatttccggccttggccaccgtgtatacaagtcgtatgatccgcgtgcggcgattgccaagaagtatcttgagaagatcatggagcgcgaggatacgcagaaactgccgtccgacgagcgtgcgttgttcgatgtggccaccgagcttgaggatattgcgttgaacgacgagtatttcgtatcgcgcaacctgtatccgaacgtcgatttctacacgggcttgatttatcgggcgatcggcttcgatccggccatgttcaccacgctgttcgcactgggccgcattcccggttggattgcgcagtaccgtgagatgctggccgacccgaacaccaagatcggccgcccacgccaggtctacaccggtccggtcgagcgcgatttcgtgccgatggacgagcggtgattattggtttgagaaagcgcttcgctggagattccagtgaagcgctttctatatgtacagtgcaaaccagctatgctgcgacggctgcataagaacgagcagggctagttctgaaattgaaataatgtgtgcggtatcgaagcgcaccgagggaaggcgtacggaagtacgtcgaccgaggagcaacgaagataacgctccattatttcaatttcagttcttgtgcagcttggcgttgagctcaattcccaccttgcggtagcgggcttcgatacgtccattcaccgagttgcggatgaacaggatgttgtctttgccggagagctcagcacccttgacgacttcgagcggctcgccggctgcggccttggccttgtcccagatgctgatcttggtgccggcggtgatgtacagaccggcttcgacggtgcagttatcgccgagggagatgccgataccggcgttggcgccgagcagcgagtgctcgccgatggagttgcgcagcttgccgccgccggagagggtgcccatgatggaggcaccgccgccgatatcggaaccgtcgcccacgaccacaccttgcgaaacgcggccttcgaccatggagacgccgagcgtgccggcattgaagttcacgaatccggcgtgcatcacggtggtgccggaagataggtaagcaccgaggcgcacacggtcggcgtcgccgatacgcacgccggtgggcactacgtaatcgatcatgcgcgggaatttatccacaccgaacacgttgacggtggtggcaggagctgcggcaggcagtccggcctgagcagcgaaagcgagagcggcttcggtggaggcgcgttcgacatcggccttgcgtagtgtgaagtcctcaacggcgaaaggaccgtagttggtccacaccacattggcgagttgggcgaagatgccgtcaaggttcagcgtgttcggcttggccatgcgcatgctcatcagatggagtttcaggtaagcgtccgcggcgttgctgatcggctcgtccaactggctgacgacgaataccggcacgcggcggatgccacgggcgtcggcttcatcgtgagccagagtgccgaaattgtggtttggacgatcggcctcggccggtgcctcaccgagattcagttcggggtaccagacgtccagggtggtgccggcggcgtctacgctggccagaccccatccccatgcggtacgctcttcgctcatagttgctccttacatatcgttgcgtttgcgttgcatgtgcatcgcggcatgtgatggttccaccttagcgtcaagtacggctaggcgggggccatagttcgtggaatggcttgaaatcgagttgttcggtaaaaaattaccgaacgtgattggcgatgggatgataggttctccggtgaaattcgctggtgaacaactcggcaaggaggtgtgcgatgtgatgctgcatcattcgggagcataggctgtggccatgcgacgcccggcatcatagagtttgcgcttgagcgaatcgggctcaagaatcactacgcggccatcccaggaatactgcaatgcccaccagaacacggcgcgttcgggagcatcgacgatgacttcgaactgtgtgccgtccggcgaatgtttgatctgagggtcgtcgaaccattcgaacacattgttgagcatggattcgtctcgtacggccatgcggatgcgaatcggggcatcggctacgggatacgggcggtgacgcatgaagttcactgcgtcaaaatcagccggcgctggtttttccagtggaactgtgccgttcctgcctttggcgctgacgttggcgattcggttgaccacgaaaatgcggagattatcctcgccatgtagatggcagatgaggtaataccgtccgttcttgtacaccatctggtaagggtcggcggtgtaggtaattcgacctgcgcccgtacggcttttatgcggtatcagggtgccgtccgggccgtaatcacggtattggaaggttacgccgtggccttcttcaatggcctgattcagttggtcgatggtggataggaactcgccgttgatatgcgtgtaggtggccacgtgctcaaggtaacctactgcttgcccagcggcacctgcgagttcgcggattttaccgatgagatcgtccatggtgtcgaggctgatgcgagacaaggtgaggctgtcgagtagcagtcgcatttcagcggtggataggaatgcgtcaagataccagccgggttgtggattcttgcattcgatgccggcaaggtcgctttcggtgagatgcccgatatgtctgccgagaaattccgtggcggtaagctttttgagctgatttcgtatggttttctcggtcggcagctcgcttggatcttccagctggtgtttacgggcaagttcatcgagtatttgccgcacggtcaggccatgtccaaagtagctgtgacgccacagcacctcgaagatttcgagggtggtgttccctgcataggatttgcgttgcgccggcttgtctgcatccatacattaaggctaccgcgcgcctcgtctaggatagaagtgttggactgaaatgcattcgctggaaaggaggctcgcccatgagcaaagggtatggtgtatttggccatgttcccgataatgcggatgacgatgacctcctgccttatgaggatgatgattccggcgtttcctggggccatgcgttgcgccgtcgcaatccttggaaaaggggaggcgacgaaggtgccgattacgacgatgatcggtatggcgcagatgacacagatgacactaatgaggacaggggtctctttgccggcaagagcagcggtataggcggtatctctggcgaggcagatggaatgcttggtggcgcaggcgctgccggcagtagagccgtaacgtttggtggaacggacagtttgtccgccgccgatgcggttatgccctatcgtttcaggcaaggacgttccgtatggttcgacgatgaggacgaaggccatttcgccggggctgcgaagcgtgccgaagcccatgccgtccctatccttgcgttacgcaacgatgtggaatcgtcatcgtcgaatgccgtgctcgctcgtgcccgtagcattgcgcgcaaagcggccaccatggttatcaatccggtatacagcgaaaatcatcgaaccgggtatgccgagcttgacggtattctacgtggcaccaccagcccatcgagtaggtatcgtaccagcgtgcaattcgacctcgatacgggagaagccgtcggtggcaagtgctcatgcccggcttacggccgtggctatggcatgtgcaagcacatgattgcgctcgccttcatattctgcgatgatccgcagcgttttgaagggtaccgtgccggggctgtgaggccgtctcggacgctgatcgactatatggagcacgtcgataggcaagatgctcaagccaaagcgcgtcgccgcaatgcgctcatgcgccgattcgatactgcaaaaagacgaaatggcgcaggtggacgacgtacgaatagcggatacggctctcgtgccggcacccgaggcggcgggtatcagggcgatagtgagactgtgggcttggggcaggtgcagcttgttccgatattgagtttcatcgatggcgtgtggagcgtggagttcaagatcggatcgacttccaatgggtccagctatgtactgaaatcgattccgcaatttgtgcttaccatggcgaacggcgactatacggattatgggcagaagcttgcctttacccatacgccggatatgttcgacgatgattcgcgcccactgctgggcttccttgacgacgcgatggccgtgcgtcgtgcggccgagcagcaggaccggtattacgggcatatcgccatcgatcgtcacctgacactttcagcaccggaagtggcccggttgctgtccgtacgtgagggcagaggcgtacagctcgtgttgaacacatggttctccgggcagcctgcatcggtgccggttgatggtggcgagccagattttcttatgcgcattgcgcggcgtgatttcaatacgtatggtccggatgccggatacctgcttgccggagtgccggcggtggaaaccgtgattgatggtggcaaggatgtatggctgttgctcgcctccactaatccggccggtgcggtatccgccatgatggcgggctctcagcgtaaaagcgcagcgggatgccgattcgtccgttgcccgaaacgattgattccgttgcgaggactattgggagacctgtttgaacccgatggcgaggggcaggtcattgccggtgatgacatcgccctgttcgcacgcacgctattgcctcagctggttggtgccggactgttggaggccagtgagattcctcgcgagctggctgaattaagtcctacggaatgcagcctccagttttatctggatcgtgatgagcatggtgtgcaatgcgaggtcaaggcacactacggcgatgccattgtcccgttgctacccgatggcccgacggtgcatgctagggatgagcgttccatccccttgtctcggggcgtgattgggcgtgatttcgacgctgagcatcttgcgattgatgtagtgtgtgaattctttaccatgcctgaccagcgcaagtgcgttgcggccgccactcatcagacggtgaatgggttccgaacgccggccgcgcgaaagaccgccaaacaattcgtgtctgatgcggccactatcgatcgcgatgacaccacgcagattgttcgtctttttgacgagggattgcccgcactgaaggaagtaggggaggtcttcaccacaccggcttttgaccggctgatcgcgcccaagccgccaagcgtcaaagtcggattgtccatcaaaggcaatttggtggagatatcgcccctcgctgatgaagtaccgccggacgaagtgggtgccttgctgtcttcgtatcgtcggcgtcaacgattccatcagttgaaggacggcacgctggtcaaactcagcggcgcgaatctcagcacgttggaccgattggccagcgaccttgatctgagcgagcagcagctcaactccgggctgatcgagttgccgggcggtcgagcattcctactggatggtgagctgccggatgacggctccgatgtagtcaaggacgcttcgttcaccgaatacatcgacgatctcaagatcatcgaccctaagtcgtatgaagtgccggatagtctcaagcatattctgcgcccttatcaggtcgaaggcttccaatggctgaacacgttgtgcgacaagggttttggcggcattttggccgacgagatgggtttgggcaaatccgtgcagcttatcgccctgttgctgtcgcgataccacaacgaatctagtggcatgacgaccgctcaaggcatggatgccggtaatgctgttaatagtgaatcagccgtaaccggtcatattactttcgattccgaagatggcgggccgcatccatcattgatcgtgtgcccggcgtccttggtgtacaactggggtgccgaattcgccaagttcgccccgagcttcaacgccgtggtggtggccggtaccaaagccgagcgccgcaccgccatcggccgcgcgttccgggcggatgaacccaccgtgctcatcacctcatacgacctgctgcgccgggatgtcgatgattacaccgccaatgagcaacgtttcaatgtcatggcgctggatgaagcccagtacatcaagaatcacaccacgaagatagccaaagcggtcaaggccgtggccgccgaccatcgtttcgccttgaccggcacgccgatcgagaaccgactctccgaactgtggagcatcttcgacttcctgatgccgggactattgggctcatacaagcgattccatgagcgctacgagttgcccatctccaacgcccgggctgcagatggcagcacggccgaaggtcgggccgccgcacaggtcagtcctgaggccgcccgggtgtctcgccaattgcagtcgttggtgggcgtgttcatcaagcgcaggttgaagtcccaagtgctgaccgatttgccggacaagttggagaccacgctgaccgtgcagcttgccggcgaacagcgcaaactgtatgcggcccacgagcagcggctcagaatgcagctcgaacacagcgaagaagccgatttcaacacgtcgaagattcgcatcctcgccgagctgaccaagttgcgccagatctgctgtgatccaaggctgctgtatgccgatgccaaggatcagtcggccaagcttgccgccatcaccgaactggtggaaacctgcgtgaatgaaggcaagaaggcgctgatcttctcccagttcaccagcttccttgatctgatcgccgaacgtttcgacgcgcaaggactacgctactacaccatcaccggatccacgcctaaaaagaagcgtctcgaactcgtcgaccagttcaatgcggacgatacgcccgccttcctgatttcattgaaggccggcaacaccggactgaacctgaccggtgccagcgtggtcatccacgccgatccatggtggaacgctgccgcgcaggatcaggccaccgaccgagcacatcgtatcggccagaccgaagacgtcaacgtgtatcaggtggtggccaaggacaccatcgaagaacgcatcttggagcttcagcataccaagagcgagctcgcccgccagttcaccgatgcttccttgcttgccgacgaagccggcaccggcgccagcgccctcaccgaagctcccgcctccatcgccaccctcaccaaggacgatctcctcaatctgctgggatgagaagatcctgctcggtgctcttgagcttgggaggcggaaacagtctgggctttttggacccgttcgctaagccgagaccggagtcgatagcggtgtggcatggtgcgtgcgtggggagcgtgattcagttgttggctgaggcgattcggacgctgtcgttttgtgctttgttttgccgttgaccaattgaaatgctcgttggtaggagacccccaataaagctccgatttgtcgatacgtgagtccctcgttgcgtagagcccgtgcggcgagtcgggattcggcagccgcttgtgcgttggctttttttgctatttcgcgctgccggaacatttctgttacgtgttgtttggcttgtttcggcaacacaaacgtcaccttgagctccggattgtcgtcgtcgttcatgacagtgatgagatctttagccattggctcgatatcgtcaagtcctttggcctgggtcgaccgttcgatagctggtacctgaacgtaccaatatcggccatcgggttgcacaagcacgtcatagttgctcattgccaccacccctttccgagtttctgctcgctctcgttgatgatatccagcgtggttcgttctgagacttcattatggcgggggatgggtatcctcaacccgtccaggcagtaaacctcatgtctgctgccttgccgtaacaaatagaaatcgagccctcgctgctttgccgcttgccgaagtttcttgatgatgagttttcttcgtgtcatcataactctcaatctcgcactagacaaaatgcgtatgccgaattgccgggtgggagttgtgggtaaacgtagagatgttcattggtccttctttctgttgtctgacgcttcgttgcgtgcgggtgcatctgacggtatgggatgaggtttctgattggcaagctgaacgggggtatgtggttctagcttccgagttatccacattgataaagtgcttttttaaagtgactttcccgtgttggtcgtggatgctgcgagcaaggcaagaacggtcgatcacgtcgcgatgtgtgtgggtgaatggtgaaagtgattttcgatatttttatattgatattcgatatattatgatggtgacatacggggcagtgcaggttcatccattgatattggattaaggagcatagccatgaacgctggtatcgcattcatctctcgcaaatctcgcaaagcagacgtcgcttggcgctatgccattgcacttggtcggtggcgggggagtcggcgttatgttcgacgtcagtgccgtcattggcagatggcgcaaccgccacgaacacaggggtctgatcgttggccagaatcgccttcaattcctcgtccgtgtatttcttgacaccgcctttgaacagatccggtcggccggcatggtgcacttcgagcacctgccgcagcggttcgtcgatttggggaatatcggccgccgtggccctacgaatcatcatgtcatccatttgattcagtctaatcgtgcagtctcgaccggcagatgatcattgcccgcgataagagacacggacgggcaagatgggtgattgttcgttcaggctttcatcctcgccgcaacgtcacggtagtctggagtgcgtgaatcgcaagaaacagccagtggagaagtatgagcggggcacccgttcgtacacgatgtcgcatattcgtggcaaagacaccaaaatcgaggtgctggtacgcagctatctgtttcgcaagggtttgcgattccgcaagaacgacaagcgttaccccggccacccggatgtagtactgccgaaataccacaccatcgtgttcatcaacggctgtttctggcacatgcatgaaggctgttccaaacattcgatgccgaaatcgaatgtggaattctggcagacgaagctactgcgcaatcacaatcgagacatcgcgcagcgggctgaactggaggccgccggctggcgtgtaattaccgtatgggagtgcgaattaacgaaagccgtgcgtgacgaacgcctcgcacggctgtatgagcagattgttgaaggagatgcagattcagcggaataatttcagctcccctctggaggggagctgaaatcagacctcaaacgggaacttcaggccccaacggtcgcgaatcgcatccatcagctccatgatgcggatggtgtcggcgtgcggcatcgcctcgcattcgatcttgccatccagcagcgcgttggctgcatcggccacctcatactcataaccggtcaactgcgacggcaccgcaacactgcgcacgggcttgtgatcgttgttgtagatatcgatggactcgggattgttgatattggtgaccaccaaatacccttcggtgccccacacgtagccgccgcgatcggaggaaaccagcatcgaactggtggacacggccatcgtgccatcatcgtaatacaacgtggtggaattctgtgcatccacaccggtttcggcggccatcatcgacgtatcgaaatgatccagcgtgcggccatggtcggcaccgatcgccatatccaggaagttcagcggatacacgcccacatcgagcagcgcgccaccggcacaggccggatcggtcatacgtgccttgccggacaccggatagcacaggttggcgctcgccgctttcacctcgccgatctcgccggactcgataacttcgttgatgagcttgcggctgggcatgtagcgcgtccagatggcctccgtgcacagcatgccggtttcctcggccacggccagcgcctcacgtgcctgcccggcgttcgcggtgaacgacttctccaccagcacgttcttgccggctttcatacacaggatcgcctgttcggcgtgcagactgtgcggggtggcgatatacaccagatccacatccgggtccgccgtcaactcctcatacgatccataagccttgtcaaaatgccattggtcggcaaaagcctgcgcgcgcgtaatatcacgggccgctaccgcatacgggtgaatccatgaggaatacagtgaaccttcagccatctgggtcagggtgtcggccatggtgtgagctatgcggcccgcacccagaatcgcgacgttgatcttttcgccgctggcctcgaactcggcgcgtttgccattgaatcgactcattattcctccttgaatacgggttggtacactcaatcgacctacagtgattatagaagaagaaaccttgtcccgtgaggcggatagaaccgaaatatggaaaacgaagcagcgcagcagccccaatctccggccgcgtctccagtcatgtcccgccgagcgcgtgaggccaatcccttccgtgccatggtattcggcgaacaagcagacaagatgatcgcccaaggtatcagcgtcatcaaattaagccttggcgagcccgatttcggcgcgccgcccgccgtacgcgacgccatgcgcgaacagtacgacggccgggccctgccgtacaccgccgccatgggcctacctgaactgcgccaagccatcgccgacttctaccgcgagcgtcatgaccttgacatcgaccccaagcgtatctgcgtgaccgccggcggttcggccgccctgctgttggccaccgcgctgaccgtggaccccggtgacgatgtgattgtggccgacccctcctacccgtgcaaccgcgaacttgtgcgctcctttgaggggcgggtcatcgacgttccgacctcggccgccacccgcttccacctgaccgccgacctgtgcagccagtactggacaagcaagaccaaggccgtaatgatcacgtcgccgtccaaccccaccggcaccaccatcgacttcaacgtattggacgaggtgtgcaagctggccgccagccgcggcgcatggcgcattgtggacgaaacctaccttgatttggccgaccgtgagccggacggcaccgaagtcaagtccgtactggcctgcgatcccggtgccatcgtgtgcaacagcttctccaagttcttcggcatgaccggctggcgtctcggctgggctattctgcccgacgaccccaccgtgctggaagcggtcgacgacctggccaccaactactacctgtgcgcccacacgcccacccagcatgcggcgctcgcctgttttacgccggagagtttggccgaatgtgaagctcgtcgtcaggaattgcttgcccgtcgccgcattgtgattgacgggctcaagcgcatcggtttgccggttgaggtggagccgaatggcgcgttctacgcctacttcaacatctcccgtactggtctggatgcctggacgttctgcgaacgcgcgctggatgaagcccatgtggctctgactcctggccgcgacttcggtgcggccacagcggatacgcatgtgcgcctgagctatgccgcctcacgtgaggccctgaccgaggggctggaacgtctcggaacgttcgtcgaatcgttgtgaacggcgcggcagccggtgtgattgttgtacagtagtcgagtttgtgtgatgtcggctggcctcgcggtgttggttgccggccgaacgactcgccatggtggcgcacggctggctgattgcgatggtcggcccgttgttcggccatcacgggttgggtaaggtcaggaatagggatcatggtcaatctgcgttcgcgcaccacgcgacttggtgtgcttgatatcggttcgaacactatccacatgcttatcgtcgacgccgctcccggcgctcgccctgaccccgaggccagcaccaaatccacagtgcgcctgatgaagtatttaaaggatgacggctcaatcaagaagtccggcatcgaggcgattctggaagccgtgtcccagtgtatgcggctggccgaggaatacgaaatcacccaaccgccacggtagccaacaacgccgcatgatcggagccctcgactttgaccaccttgcattgcccggccttcatgccctgatcaagcaccacgtggtcaataccggcgaacatcggcatatacacgcggttcgtaggccacgaaaacgtaaacccatgtccggattcacgtgcggcatccacgaaccggtcgccaagaaaatcacggaatggcgtgtgatcgtaagtggcattgaaatcgcccatgaaaatataccgtgtatccgtatgcccgcgcatcggacccaactcatccagcgatcgcttccactgccgccaatagccgggtacgggagcggtggtgtgcacggatacgaatcgaatctgctgaccacccatatccaccgtgccgccgggcatgaatgaggcgctggaattcacgtcatcgtcggccggatcggcaagtggcgtggccgaccagaggccgttaccgaatacgccgtcagacgatgagacctgcgcatacggcagatagtgctcaatgccagcctcgttgagttttttgacgaaatcctcggtggtctcctgcaaagcgagcacttcgacgcgctgatcgcggactagttcgacgatggcttgtgggtcggcctgccccttgtatacattgaaggtcatgacgcgcgcgtaggcatcgctggtgttgggggaggccgcagccacggcgttctgcgcggcttgggggagtgggtcggtcgagtagaagaacggatattgccaatagccattgcatgcgattgcggcgatggcgattagtgcggcaaggatacgccgcgacacgatggccaacagtagggcaatcaggccaagcaacgtgaaccagggcgttgccgataccacaatcggcacaaatggcagttcctgtaaatcggcaggcagcgcgcgggcggcagtgccggcaagggcaagaagcgcgaacatcgtggcgagaaaaccaagcagacgatgccgtttgtgtggcttcacggcagacttggatactgggcgtgccgtggctttggcagagcgtggcttggcagcggcgcgagctcgtacgcttgcacctgtggtagtactccgtgcctttgccatgctgccctttcctccggcttgtttactgttaccttgcttttcgtgcgatttgccactgtaccgtgtgcggcttgtctttcagtgtcttttcgccgtgcgcaagagcagttcgcaccaaaccagcacgaaaaccggccatgccttggtggcgggttctgccaggtagcttacacagactgccatgcgtcttatgtaggctgccacgcgaacatgatgcgactgggcgtgcggccgtgtacaatgaaacgtcgttgcccgagtagctcagtggatagagcaccgctctcctaaagcgggtgtcgtcggttcgaatccgatctcgggcacttggcttcggaaacatgacggtatctcagcctctattcatcggtgatgagccataggcattaggcatgtgtaaacgtataggttccatcatccatcatcccgtcatgtgaaactatgcaaagacatgtggggcttcacggttatcgtgagggtccatggctatcgaatacacggaagagaagcggtttactgtcgaacagggtgaggcgctgttcaagtcggttggttgggaatcggcgcagtggcccgaacggttgttcaaggcattgcagcattcggatacggtaatcagcgcatgggatggcggctatttggtcggcttggttcgcgtgctcgacgatacgggagggggcgaaagtggcggagtgtgctgatcgggggcaacgtacgtagtcattgacggttatcccgtagtaatgttcacgatacgaccccttgtccatacagtgaaaataacggctggcgtccgacgcggctgcgctatgactagagaccatgagtgaagacaaacagtatgacttctatgtggccggtccgttcttcgatcctgagcaaacggcaagtatggaacgtttggaaaagatactggaagatcatggcaaggtactgttcaagccgcggtttgtcagccagatcgaagaagtcggccctgaaggatgttttgcggacgatatccatggcattaatgctgctaaagccgtggtcgccaatcttatggacgaggacccgggcacgatgttcgaaatcggatatgcgcatgcgctgggaatcccggtgtacggctatttcgaaaaccttacgccaatggatcgtgtcaatctgatgattgcgcaagcggtcgaactggtgttcgtcggtcctgatgatgtggcgaaatacttggaaaccggcgaacatacggaagtcgattacattcagttctaaacagctctaacaggttctctgcaagcagggttggcggcgttctcgtacatagtcacgtacgggaacgccgcagtggtatagggatattccaacaagcggcataatggagtcgtgggaaaaccagtcggatacaagtgaagtgtccgaatttcgtaaggagtgccgttatgagtaaccacaatcccatgaatattgccaccgactttgccaaggccacgggaggaaccgctcgcaaagttgttgctttgaccgataaaggtccgttgaatggctttaagaaattcctgtcgcgcggatcgatgattgatatggcggtaggtgtggtgatgggctctgccgttaccgctgtggtcaattccatcgtcgacaatctcatcagtccattaatcggcatgattggcggcgtaccggatctttccggactgctgaccatcacgttcaacaactcgactgtttcatttggtgcgattcttaacgcgctgattagcttcctgcttgttggcgtggcggtgtatttctgtgtgattttgccgattaataagcttcgtgatctcactgctgcccaggatgaggctgacgctgaagaacaggggcctagcgttgaagagcagactctcgccacgctgcaggagattcgcgacgagctgaaaaaggccaatgactccgccgagtaatctgccgaatgtacggtgcgacagatttacctggtttgcccgaaataacggattgccggggccatttggtctggacaatccgttgtttcgcgcgtgttttgtagcatccgtggagttacatggggagtatgactgaaaacatcgctgataaggccataaacgatactcgtatcgtcaagcagttcaccaatcccgtcaaggagccgattgacagcgacatcaacctgttcgatttgctcgatgagcgagccaagcgcgatcccgatggcgccatgatcgaatataaaactgaggatggcacctggcagccgtacagcgcccaggtcttccgcgacatggtcatcgatctggccaaaggcctgattggtctgggcgtcaacaagggcgactccgtggccatcgtgtctcgcacgcgttgggagtggaccgctctggatatggcgatcatgtccatcggcgcactcaccgtgccggtatatgagaccaactccgccagccaggtcagctggattttcaacgattccaaggtcacgctcgccatcgccgaggatgacggtcagcgcgacaagattgaatccgtgcgcagcgaggtgcccaccctgcgcaacgtgttcgtcatcgaagcaggcggcctgaacgccatcaagacctatggcgaaagcgtcaccgatgccgaattctgggaatacaagagcgcctcccacggcgacgaccgcgccaccatcgtttacacgtccggctccaccggcaccccgaaaggcgtggagctcacccaccgcaacttcgcgttcctggtgcgctccggcctgcagtacatgcctcgtgccggcgcatggcccaaccgccgtctgctgctgttcctgcccctgagccatgtgttcgcccgattcctggaattcttcagttttggcggcaccatttctctggccctgagctccaatatgaagaccatggtcaaggacttcgagaccttcggccccacgctgctgcttgccgtgccgcgtgtgtacgaaaaggtctacaacgccgcctcccagcgtgccggcagcggttttgcgggcaagatgttcatgcgcgccgccgaaaacgcgcgcgaatggtccaaggccgagcagaagggcgagaagctgccgcttcccggtcgtattgctcacgctttctacgagcaggtggtgtacaagaagattcgtaccatctttggcccgaacgccgactttgccgtcaccggtggagccccgatggattccgagctctcccacttcttcaacggcatcggcatgccggtgctggaaggctacggcatgacggaaacctgtggtccggtgtgcgtgagcttgccggaagacaatcgcatcggcaccatcggcatgccgatgtgcggcatcaccgccggcatcgccgaggatggcgagctggtgatcaagggaccgctggtgtgcaaggggtaccacaacaaccctgaggtcaccacccagcagatcaccgatggctggctgcacaccggtgatttgggcgatatctccgaagacggattcatttccatcactggccgtaagaaggacctcatcatcaccgccggcggcaagaacgtgtcgccgggtctgcttgaggcttccgtgatgacctcgcccgtggtcaaccagtgcttggttattggcgataagaagccgttcgtggccgctctggtcacgctggatctggcggatgccaacaactggttggaatcccaaggcgccaaaccggaacccgatctggcctcgctggccaagaacgccatcgttcatgccgaggtagagcgtgcggtgaacgccgccaacgagggcgtttcccgcgccgagtcgattcgtaagttcgagattctgccagacgaattcaccgaggccaacggcatgctgaccccgagcctgaagacccgtcgcgcgcaaatcgttgagcactatcgcgagctcattgacgacgtgatctacgtgccgttgaagaagtagctatcaactccctctgatccaaaaaataagctctctctgacgagggagctgtcagccgcaggctgactgggagagaccgcggctagcccgcgaaacaacaaggccgggtgcgacttgcacccggcctcagcttattcagtccaaaatcgccgaaacataatcggcggcggcctgatccagctccgcatcgctgatggtggcggtgccctgcaccaggaatggttcggcatagttcatgcctaccttgtaggccacgactgcgaatggacttagcagctcctccatggtgtggttgtactcgccatccttgcggtacttggaggcgtcggaaccagtggtgaccaccagcttgagctccttgcccttgagtgcgtggcctccaccgtaggcccagcctgcggtgatgacctcgtcttcccattccttgagtagcgcgggggaggagtaccagtagaacgggaactgaaggattacgcggtcggcggcctccagtagctcgtgctccttgtcggcgttgacggagaagttcggatattcggcgtattcgtcgcgcacgatgatgtcgtcctcgccttgtgcggcgagttcggcaagcagacgggcgttcgctcgcgagccgtccttcaggtgcggatggaatacaagaatcagcgttgacatgggatttcccttctataactgctaccaatgtggcctaatcaccactatcgtatgccgggaagcagaactcagtccagtccggattcaggtgcgagccgcgggatgccgcgccgggaggcaactcagtcgaggttggactgcgtgcctgcggtggcttcgttggcggcttgctcggcttgtgcctggtcgagcttggctcgtacgtcgttgagcaggccctgggcgcgcttggccaaggcctcgccgatttcccattgacgcatcgactggtcaagattgaggccgccggtttccagtgcctggacagcctgaatcagcttgtcgcgcgcctcctcatatggcatctgggcgatgagctcgcgttccttgtccgtcagggacgaggcgggggtgttcttgtcggtgggtgtggtgttctcggtcatcttgttctccttatatatacggtatatatgcgtgaatgcatatggtgcattacgcggttgcggttgcggatgtggcggtggcggtaatgacgccctttttcagggtgacggtgatgtcatccccggtactgacccgcgaagcgtcatccagcacgtggccatcggaggactgcaccaccgcatagcctcgattcaatgtggattgcgggctgagtgcggtcagtgaggcatgggcgcgttcgacggtgagctgggcatcgtccacgatgcgtcgcaggccgatgtcaagccgctgcagggaatcgtcgattagccgctgatgcggttcgagcatggtatgcggttgggtcaggcttggccggttcgcatatccctcgataagtcgaatctcgttctccacgcgcgaacggatccgcagtcgcatacggtcgatggcaccttcgatgagctgcgactgctcacgcacatccggcaccacgcgcttggccgcatcggtgggggtggaggctctaagatcggcgaccagatccagcaacgtccagtcatcctcatgcccgatggaggagattaatggtgtggtgcaggcatacgccgcacgaaccacacgctcatccgagaaaccgatgagatcctcaaacgagccgccgccacgggccacgatgatcacatccacgctcgggtcggcatcgagttgtgcaatggcctgaaccacttcggccgggcattgctcgccctgaacatgcacatggaccaccttgaaggttacggaaggccaacgaaggttcacattggtgatcacatcgccttccgcacgtgcctgaggtgcgcaaatcaggccaatagtcttcggaaactccgggagaggcagtttgtgatcggcatcgaacaggccctcgcccttaagctgcttgcgcaattcgtcgatcatggccttgagactgccaccggctccgaccttgagaatcgtgtcccctcgcaacgacagcgaagtgcgcttcatccacaggttcggtttgccatgaatcaccacgcggtcgccctgaacgaactggctggccgcggccgcgaacctgccgaagccattgacttccatggcgatatcctcgaagtcgtcgcgcagcgtgatgtaggccgagccggcgcgacgggtattgatctgcgtgatctggccggtgacccacgcggacggccatcgttccacggcaccgtagaacttctggctcagcacacttaccggccacggattttgcgcgctggtttcagcggcgcgtgcaggcagctgatcgatagggcgaggctcattcggcagattgatggtgccctgatcaggcgcgaaagtgccttgacccggctcaaagccagccgaggccagtgaagcggcggtcggtggacggccggtagatgggtagcccattgcagtagtcatgcactccactataagtgcgttggttgatgacggtaaatatttaccgtcgcctgaaaacggtgtgatgatgaatgcgagaaccgtacgaagcgatgtatcagccgatgatggagatggtttggtgcatcagaagaaaggagtcattatggcgaagaaacgggtgctatgaagaggagtgagatatgcgttgcgctgacgattgagagtcgtcagtgagctcgctgtgcgacacgcgagcagaaaacagttacgctaatcacacacttgtggttttggcggaaaatagccgaaaaccctataaatagttcgacacaccactgttgagcactagatatagtggtggggatgccgtattcttctagaggttcaagaaaacgacatcaatgtaatttcgtgtggcccacgtcgagtgcggccaaaatgcggaactcaggagagtgttcgccttataggaaaggggtgcccgatgggcgcacaggtgttggaggaaatcgtcaccgataacgagaccaaggtggccgccaaggcctccaccgtgctcgttgagaagcgtgatggtcgtgtggtcgacttcgaccccattaacatcatctctgcggtcaagtctgctttcggtgacctgaacaaggaagtcggccccgaagaagatgccatgatccgtggtttcgccaaccaagtcgaaggcgaaatcaaggggcgttacgccggccccgccaagatcgaggacatccagaacctcgtggagcacgccctcattgacgcccacctgtacgatgtggctcgcgcctacaccaactaccgtctcgacaaagacattcagcgtgccaaggccactgatgtcaacgaggccgtttcccgcttcatcaaccacgacccgaccctgattcacgagaacgcgaacaaggattccaacgtctactccacccagcgtgatctgctggccggtgccgtgtccaaggccgccgcgttcaacatgctgccgccggcggtgtccaacgcccacatgaagggcgacattcacttccacgatgccgactactcgccgttcactgcccagtccaactgctccttgccgaacttctgggacatgttggccaatggcttcactcttggcaacgctccgatggcttccccgaagtccatcgccattgcggccacccagattacccagatcatgaaggacgtggcctccagccagtatggtggccagaccgccaaccgtgccgacgagcatcttgcccagtatgccaagaaggattacgagaagttcctcgaggaagctcgtgagaccatccccgacggcatgccggttgaattcgcccgtcgtcaggtcgagagcgccaagaggaacgagcccgccaagctgcatttcggttcccgtgaaccgctgccgatggacaccccgttccacaccgacgttgacgaacttgagcaggagcgtgaaatcctcgccaagattcgtacccgcaaggccatctatgatgccatgcagaccatggaataccagatcaactccaaccgtgtgtccaacggccagaccccgttcgtgactgtcggctttggtctcggcaccgactggttctcccgcgaggtgcagcgcgcgatcctgctgaaccgtattcgtggcctcggcaaggaacaccacaccgccatcttcccgaagctcgtctttactgtgcagcacggcgtgaacgccgacccgggtgacccgaactacgatttgaagcagctcgccctcgagtccgccaccaagcgcatgtacccggatgtggtgttctacgagaacatcgtcaagatcacaggctccttcaaggctccgatgggttgccgctccttcctgcagggttggatcaacccggagaccggcaaggacgaggaggatggccgtatgaacctcggcgtggtcaccgtcaatgtgccgcgtatcgccatcgaatcccacggtgacaaggctcgcttctggaagctgttcgaggagcgtatggaagtcgcccatcaggccctccagttccgcatcatgcgctgcaaggaagccaccccggtcaacgccccgaccctgttccgcttcggtgcgttcggtcgtcttggtgccaacgacaacgtggaccagctgttcaagaacgagcgtgccaccgtgtcgctcggctacatcggccttgccgagaccaccgcggtcttctacggcaagaactggattcgcgaccacggctgggatccggaaggcaaggagttcgcgctgtccatcgtcaagcgcatgaacgagctgtgcaagcagtggagcaaagcggagggctaccactattccgtgtactccactccggctgaatccctgaccgaccgcttcaaccgcatggaccgtgaaaagttcggccgtatcgaaggcgtgactgaccacgacttctacactaactccttccactacccggtgtggttgcagcccaccccgatggagaagctcagctacgagaaggacttcccgtactacgcttccggcggcttcatcaactactgcgagtacccgtgcctgcaggacaacccgaaggcgctcgaagccgtgtgggattacgcctacaacatcggcatcggctacctgggcaccaacaccccgatcgaccactgcttcgtgtgcggcttccagggcgactttgagccgactgaggaaggcttcaagtgcccggagtgcggtaactccaacccggacaagtgcaacgtcaccaagcgcacctgcggctacctcggcagcccggtccagcgcccgatggtgcatggccgtcacgaggagatcgcccaccgagtcaagcacatgagcggcgaaaccggtcgtgtgacgctgggtgacggcaccactcgcgagtggttcgaagaggccaagtagggttattcgtgagtaggctcccctctctgaggggagctgtcagcaaagctgactgaggggagtccgaggagctattccgaagctcccctcagtcgcctacgacgacagctccccctcaaagaggggagctaatgttttccgcaaggagggaatcatgccggagttgcatacgaccaagcccaaacccaagcgccatgactttgcggccggcgagaccgggcgtggcccctccgtaccctccaacggtcttgccaacgatccgaaagccggtcaatgggatggccggcgcatgtccaagcggatgatcgccgactacaaaaccttcattgtcaccgacggagaaggcgtgcgcaactccctttacgtctccgggtgccccttccactgcgtcgactgcttcaacgcctccatctgggattttcaagccggccacgaatacacgcaaaaacttgaagacaaaatcatcgaagatctgaaagccccatgggtgcaaggcattacgttccttggcggcgagccattccttaacactcccgtgctggtgccgctcgcacaacgtatccgccaggaattcggtcataccaaagatatctggtcgtggaccggctacacatgggaagaactcatgcgccccggagaaaccccagacaagcttgaattgctacatctcatcgacattctcgtcgacggccgctacctcagagaccagaaggactcgctgctgcaattccgcggctccagaaaccagcgcatcctcgatgtgcccaagtctctggaagccggcgaaccggtcatctgggccaagctccacgatcaagaacgagatatccccgaaatctatttgaaagaccgcgaagccggcgaaggccaacaggcctcgtagtagcagttctggaatgccgcactcagcaatatcgttggaactgttgggggaaaggccttcccgtgagcgaaatcacttcgcctcgtgccatgttgggcaggtagtcggactaatattccagaagaagtagccggtcgaagccgtccgcagggtatctgccagccgtcccgaaacggtttctgatgcctcgtggcgtgcactcccggaagtcggaattaagaggaacacatggttgacatcgtcactgacgcgagcgcaacgcccgcctcacaactgaagccgctgcgtgtgggattggatatcggctccaccaccgtcaaggccgtggtgcttgatcagtccgattccctgaaagacaccctattttccgattaccgacgtcaccatgccaatgtgcgtgccaccgtggccggtctgctcgtggacattcataaagagctcgtggaactaggtcgaggcgacgagccgattcgcctgtccatcaccggttccggtggcttggcgctcgccgataacctgcatgtgcccttcatccaggaggtcatcgccgaaaccgaggcgatcgacaaggaatacccgcaggccgacgtcatcatcgagctcggcggcgaggacgccaagatcacctacctgaagcccacgcccgaacagcgtatgaatggttcgtgcgcaggcggtaccggcgcgttcatcgaccagatgtccacgctgcttgacaccgacgccgcaggcctcaacgagatggccaagagctacgagaacctgtatccgatcgcctcgcgttgcggcgtgttcgccaaaaccgatctgcagccgctgatcaacgacggcgcggccaagcctgatctcgccgcctccatcttcaccgcagtggccacgcagaccattgccggcctggctgctggccgcccgatccacggtaccgtcatcttcctcggtggcccgctgttcttcatgtccgaactgcgcgccgccttccagcgtgcccttgaaggcaaggtcgacgagttcatcgtgccgaccgacgcccacctgtatgtggcctacggttcggcattgcaggccgacatggattccgacgatcagggccaccatttcgaggcccacacctgcgatgagatcctcaagcgtctggacgagctgaagaacctgccctccaacacgcccaccatgccgccgctgttccccaccgaggccgaccgcgaggacttcaacaagcgccaccacaaggaacacatccacatcggcaccctcgaaggcgcgcatggcccgcacttcctgggcatcgacgccggttccaccaccatcaaggccacgctcgtcaacgacgaccgtgaaatcgtctggtccagctacgccaacaacgaaggcagcccgctgaccgccgccatcaacatcgtcaagaagatccaatccgagctgcccgaaggcgcatggatcgcacgctcctgcgccaccggttacggcgaaggcctcatcaccaccggcctgcacctggacgagggcgtggtggagaccatggcccactatcgcggtgcggagatggtcagccccggcgtcaccgccgtgatcgacatcggcggccaggacatgaaatacctggccatcactgacggcgtcatcgactcgatcgccgtcaacgaagcctgctcgtccggctgcggctcgttcctgcagaccttcgccatgtccatgggcctgacgattcaggaattcacgcaaaaggctctggcttccacccatccggtggacctcggttcgcgttgcaccgtgttcatgaactcctcggtcaagcaggcgcagaaggaaggcgcctccatcgaggacatcgctgccggcctgtgctactccgtggtgcgcaacgccctgtacaaggtcatcaagttgcgtgattccggcgaactcggcgacactgtggtggtccagggcggtacgttcctcaacgacgccgtgctgcgcgccttcgagctgctcaccgaacgtcaggtcacccgcccgaacatcgccggcctcatgggcgcgttcggcgccgccctgaccgcccgcatgcactatcaggatgaggccgaccacttggacgtggtggttaaggccgatgggtccgaggaacagtccgaggccgagtccgcacccaagttcgagcccaaggccgcagccttcaagaagaccgagccggccaagcccgaagcccatgtcgttgtcgtggacggtgtgactcacaccgccagctccattctgaccggcgaagcgctcgacaacatgagcatgaccgccgagcgtgacgtgtgcaagctgtgccagaaccactgcaagctcaccatcaccacattctccgacggctcgcgcttcgtgaccggcaaccgctgcgaacgcggcggcgacgccaagaagaagcgttccgaccgtccgaacctgtacgactacaagtacaagcgttgcttcgcctaccgccgtttgaccgacaagaaggccactcgtggcgagatcggcattccgcgcgccctcaatatgtacgagaactacccgttctggttcacgctgctcaccacgctgggcttcaaggtgatgatctccggccgcagctcccacgagctgttcgagaccggcatcgaatccatcgcctccgaaaacatctgctacccggccaagctggtgcacggccatatcaagtggctgatcaacaagggcatcaagaccatcttctacccgtgcgtgagctacgaggagaacctcgtgcccaacacggacaatcattacaactgcccggttgtggccaactatccgctcgtcgtcggcgccaacgtgcctgagctgcgtgaagacggcgtgcgctacatgcacccgtacttcaacctcgccaaccatgagctcatggttgaccgcatcgtcgaagagtttgcgtgggccaacgtgacccgcgaagaggccgaaaccgcggtcaaggccgcctatgccgaagacaaggtcttcaagcatgacgtgcagcaggaaggtttgaccgcgctcgcctatatgaaagagcacaactgccgaggcatcgtgctcgccggccgtccctaccacatcgaccccgaaatcaaccacggcatccccgaaaccatctgctcgctcggcatggtggtgctctccgaggattccatctgcgaactgcagccgggggagaagctcaacctcaccgaattcctctcggaaggcgaagccgacccgcgctccaagaacgccgccggattccgccacgtgggagaccgcacagtcaccaagatgccgttgcgcgtcaccaaccagtgggcctaccactcccgtctgtacgcggccgcacacttcgtggcctcctacccgggcctcgaactcgtgcagctcaattccttcggctgtggccttgacgccatcaccaccgatcaggtggccgaaatcctggcagacaaggcggacgtgtacacgctgctgaagattgacgaggtctccaacctgggtgccgccaagattcgactgcgctcgctcaaggccgccgtcgaggaacgcgaagccaacaaggcccgcgaagccgccgcggccaaggccgtgcaaggccccaagtccgccggattccgcaagaccggctccaccgcgccaacccccggccgccagattctgctcgacagcaccatggccgccaatccgaagctcaccaaggccatgcgcgaggcctccaagcgtgccgccgaacgcgacctgcaggccgcagtcgccagcaagaacggcacttcggacggcaccaccggcgtgacgaacgccaagaacgccaagaagtccggccacaacaacgccaccatgtcccgatacgcgcatcgcgagaagttcgtcaaggacatgaagaagaactatacgattgttggccctcagatgagcccgatccacatgtccttggtcgaagcggtgattcgttccggtgggtacaagttcgacatcctgaagcacgcgagccgtggcgatgtggaaaccggcctcaaatacgtgaacaacgacgcctgctacccggccatcatggtcgtcggccagctcatcgacgcgattctggaaggcaaatacgatcccgaccatgtagcgctcgccatcacccagaccggcggcatgtgccgtgcgaccaactacttcggcctgatccgcaaggctttggtcgatgccggctatccgcagattccggtcatcgccatttctacccaggggctcgaagataaccccggcttcaaggccaccctgcccctgctgcaccgtgccatcaaggcgctgattctgggtgacttgctcatgaagtgcctctaccgcgtacgcccgtatgaggtggagaaaggttcggccaacaagctgtacgagctgtgggacaccatcgtgcgtgagaccatcgagcatcacggctattccaagaccgcagccaaggcaccgagcatcaagaagggctatctgccgtataacgtgctggccaaggagatcgtgaaatcctttgatgcattgccgctgcgcgacatcccgcgcaaggtgcgtgtcggcgtggtcggcgagattcttgtcaagtaccagccggacgcgaacaaccacgtggtcgacgtcatcgaatcccaggattgcgaggccgtggtgcccggcatcatggaattcatgaccacccgcccctacatcaccgactggaacgagaagaacctcggcatgggcggcaacaagacggtttacgccctgatgcgcaagggccttgacctgtacaacgcgccgatcaaggccgcgctggccacatcgaacggcaagttcaagcaggacgagccgatgcccgaactggtcaagaaggccgccgaagtcacctccatcggcgtgcaggccggtgaaggctggctgctgacggccgagattctggaactcatcgaacagggttgcccgaacgtgatctgcgcgcagccgttcgcctgcctgcccaaccatgtgaccggccgtggcatgttcggcaagatccgtcgtctgcatccggaagccaacatcgtctccatcgattacgatccgggtgcctccgaggcgaaccagctcaatcgtatcaagctgatgatcgccgccgccaagaaggctcacaacgccaagttcgccgaggccggcgagccgcagggcttcacctccgcggactgatttatgctctggctcgtccgcaattaaggacgagcttcgctcgcgacatgctggttcgcctatcggctcaccctcgcctacggacagtccactgggctgtccgctttacggctcggcctctgtgaggggagctgtcgcgcagcgactgaggggagtctctagagcgagaaaccgggccggagcctgctatcggtttttcgtatagcgtattacgggctttcgggcacgcgcaccggccggctcgaatacgatacaaagcatggttactccccgaatcagttacgcgcacctgctcgccaagccgaaccccaagcacgtcgaaagcctgctcaagttctttgagaatggacgctcccagcggggcgccggcggcttcggcgtggagatcgagcacctgcccgtgcacaacagcgacgacaccgccgtgacctactacgagccgaacggcatcgaaacgctgctcaaacgtctcgtaccctactatgacgaggacaaggaatactgggagaacggccatctggtggggctcgcgcgccccggcgtcgccgtctcgctcgaacccggcggccaggtggaaacctcaatcggcattttgaagaagccgagcgacctaagtacgttgtactccaagtttcgtcgcgagctcgacccgattcttgacgatctcgacttccgactggtcaactacggttaccagcccaaatccagctttgcggatgtgccggtcaaccccaaggatcgctacgatgcaatgaccgactacctcggccgcgtgggtcagttcggcccatgcatgatgcgttgctccgcctccacccaggtcagcatcgactacgtggacgagcgcgattccatcgaaaaactgcggttgggcacagttatcggcccgattctggcctacttcttccgtaacgccccgtatttcgaaggtgagacgaacccatggccgctgctgcgccagcgtatgtgggattatctggacttccagcgcaccaatgtgctgccgggcctgttcgatgctcgctatggttgggaggattacgccatcgacgtgctgtccacgccgctcatgttcgctgacctgacccatacccctgaagctgtggcttctggagcaagtcccaaggaactgcatcgcccggccttccgcgagaacgcgggggaggtgtacccggaccgcgaactcaacccgtacgagatcaaccacatcatctccacgcacttcaatgacgtacgcctgaagaacttcatcgagcttcgccactgggattccttgccgatcgagcgtgccgaacgtctgacggagattgtgtcctctctgttctacgtgcccgagcatcgcgaccgcttggaaagctacttcgagggcatcagcgaggaagaggtgttcgaggccaaggccaacattcaggcccacggccgcgaagccacgccgtacggccagccgctcgacttctggaaggaattcctgggattggagggcctcttgtccgacattcccggcgatctgaagcaccccgacgtgttccagaagtagttggggcgatcgaggaaagaagtcggttactatgttgcgcaatggcagattgcttgtggatgtacaactaatctgccattgggggctggtgacgttttgttggactcgtcattgattccatcaccaccgatcatgccacaagaccgagctcgcgtcgacgatccatgatgcccgtgtccgggctccgtcttgatccgcctgtcccggtaccggaccatgtagtcgtcgagcatgtcgatgaacccgtccatcgagacgcccgcgaagctgcgcttgcggaagaactcctgcctgggacggccgaagaacccctccgcggccgcgttgtccggagaacagcctttcgcgcccgtcgaacgcgtcaggttgttgtccgtgcggatgcggatccgctcgggccaccggtagtggcggccgcggtcggaatggatgattggtttctctccgtccttgagcgtggagcagacgtcggcgagcatgccgttggccaatgccgagtccgggctggtgcggcgaccggcatgccgtcatggcagtcgatcacgggcggcaggtaggcctttcccgcggggatggagaactccgtgaggttcatggcccacggcatgttcggccgctcggcgtggaagtcgcggttcgccaggttcttcggcgccttggtcagctcgcccttgtacgagctgtaccgcttcgcgctcttgaacaggggcactaggccgtgcctggtcatgagcctcatgattggattggcaacggtgtgttggacagttccttagaggacgagcccttgttcggtgaattccttcgggctccggtatccgggggtggagtggagccgctggttgtcggactgccacacgtagtcgtcggggtcgcgccccggctgctcgatcgtggcgtagctgttccggtacacgagctccttcttcaacagcctgttcgtcggctcgaccacggcgttgtcataggggttacccttgcgtgacagcgatcttttgatgccgaacacgtcgagcagctcgtcgatcctcgtgttgtcgaactcgcttccacggtccgtgtggaacacctggacgtccgtcagcgggaagtcgagcgtggcgaacgcgcccaataccaggctcgcgtcccgggtccgcccgacggaatggccggcgatgtccctgttcgccaggccggccagcaggcacacgtacgcccacccgttgccgaccctcacgtaggtaaggtcgctcgccaggtgcgtgtgcggggcgtagccgtcgaactcgcggtccaacaggttcgcgagcctggcctcgtcggcccgcgtcttgtgcggttcggaccgtctgcgcgcgtacgcgctcgtcatgccctgttcgcgcatgatgttgccgatgcgtctcctggacgcggtgacgcccctcctttccagagcggccttgatcttcctggcgccgtagcgttcgaggccgtcgcgccggaccgcgcgcacgtcgccggcgatcggatccgcacgctccgtctcgggatgcccggtcatccagtagtaggtggagcggggaacgccccgcatcccgcatcgcgccgatatcgggcagcgggcggcgttggcccgtatcacgcctgccttcgtgcgaataccggcgccgcttgttctgaaacgcccaccccccatctccaaccgccggccacgcctccccggcccggccggctcgttctgctcgggcgtgcggttgtccgcggcccgagtggagccgctgctgcggatgccctggacccagcgctgcagggtcgatcgcgcgatgtcgtactcggccctgatctcccgggatggcttgccgctcccgttacgactgcacgatctgccgtttgaacgcctcatcgtagtggcggggatgcttcgggccggccatcgtcggcctccaacctcatgtcaatcgtccctcatcggaccgtctaatacattatagccaatccacagcgagatcgaatgcggcgcacgcgaccttcccgaactcgagcaacgggccatccaatggatacactcgacaaccaacccaaaacaacacacccaaacgcttgacaatgtataggagcatcaaaacacactggtccgcgtaccacgacagcaacgcgcccttgccgggatggccgagctcgcggatcacgtcggcggcgcagcgttcgtatttgatgtacaggtccacggccctgtcgcgctgctccctgccgtacgtcgccatgaggggttctcctcccggtcagggagtccaagaaaacgtcaccacctcgttgcattgtttttatttgacgtactcacacttcaatgtgtcgggtcgggaattattagctcgataagctgccgccattcctctgcgaagtcgagtgcgcagccgctgctgagccagcgcagttgcaacccgtccatggctcccagcacctgaatcgcagtgcgttccggattggacacatggtctcgtgcagcggcgacggcatattctttcaagacgttcttctcgcgaagctgaaagtactcgtgtgcagggtggtcttcacttaatgcttcaccctgtaatagcacataaagactcactaactgacgacgattggcgttggtttctgctgtagccgtggaaatggttctgagaccataatcgcagtgataagtaatgccgtcattgatatcaccagaaacgccttctacccccaaatatttggcaatggcaatctgattgacgtgatcggcgtactttaacgcttcgaccataagatcttctttattcttgaagtagtacagcaagccagcttcggtaatgccttgggcttgggccacgtcgcgaatagtgaatccccagaagccgaattgggagataaacgtcatcgtggtttcgaggatgctttttcgacgattctctgcgctcatttttttgggggcgtctgttccggtacgacgacgcatgacgttcctttctttggacagcacatagaggcgatattagggtggcgtggataagccgttattcttcgatatgttacgtcctagtaggaacttaacgatatggcaggaacgcgcattcgagcgaaaacatcctctgagattacatgagcgtctgggcgggactccgctcggacgctcatggcctgatttcggaagaggtttgtggatcaggttttgagggggcgtgattacttgccaaagccggcggtcaggcctgcgaccatttgacggcgaccgaagatatatgccgtcagaatgggtagtacgctgatgacgactgcagcaaggatgcccggcacgtcaacggtgaactggccctggaaaagccataggctcagcgggatgacgcggttggatgcgctttgggtaaggatgagcgggaaaaggaatccgttccacacgttcagtgcgtcatagattgccacggtgataatggcaggcttcaccatcgggatggcgagtcgaaccatagtggtgaactcgctggcaccatcgacagccatggcttcaaacagggacagtggcacatcgcgtaggaaattggtcatgatcagtacgctgattggaatagcgaatgccgccgaaggtagaatcagtgcccataaggtgtcatagagcccaatctgaataatgatgtagtacacgggaataatcgtggcctgcatcgggatggccaagccggtgatgatgactttgtatatgccgcgcgaccatgcgtcattgcgacgaacaatcatgtaggagaccatgaacgagacgatcaggataataagcacggtcatgacggtaacgaataccgaatttcccacatacaacaggaaatcgttctcaaacacgcgcttataagcatcaaaagtggggtttgaggggagcgagagcggattctcagtgaaaatatcattctgttgcctgaccgaagtaatcagaatgtaatacaccggtacgatgacggtggcgagccatacccagccaaggaagccgccgagaatgttatattgcttgttcttgatacgaatcatggtcgaatcacacgccttccatctgactttccattttgtctgatcctgagagcttgttcagtagcaacgagatgataatgcccatcgcgaggatgatgacaccgaccacactggctccgcccatgtcgtagcttttgaagcccttcaaatacatgtcgagcggcagaatacgagtggcgttgcctggtcctccctgcgtcatgacgtagaccagatcgaagtaggtcagagaaccaacgatcatcaacgtggaatcagtagcgaatgtgtacttgatttgcggcagcgtaatggaaaagaactggcgcatagggcctgcgccgtcgatcatcgcggcctcatacaggttttgcggaatctggcggactgcgccttgatacagcagagagtgcaacggaataaagcaccaggagaccaccatgataagtacccacagcgcggtatttgggtcgcccaaccagttatgggccagccagtcaacgccgaatgccttgccgatgccgaattgtgggtccaacaagttcttaaaggcaatggccactgcggtggagctgaagagcaggggaatgaagtagaagacggacaagaatgcacgatacttctgtttccccgccataaaaacgccaaggaggatgcagatgggggtttgtacggcccagctgacaatcgtcaggataatcgtcagtcgaagaccgttgaggaccaaggggtcggtaagcattctggtccagttgccgataccgttgaaggtaactgcgccgagaccatcccagttcatgaaggacagtaccaccacaccgatcagcggaataattgcaaatattccgaacagaaccagtgcgggagccgcataccagactgacggtcctttatgcaatacggttggcttattgttagctggtttcgaaaccttggaactcatgacatcctccttatcgtcctatctattgcttcattgcgtgaatcacttgagcgtagagttcatggcatcgacgaattgttccggggtcatggtcttgaggaacacctgctcgaggttgttcagcacggcctgtccttggtcgctcggaagagcaacatcccaagaaagctggtagttcggtgcattcttgacggaatcgtagatccaggtgtaatagccggaaccatcgtcagctgcggcaatcttgtcttcaatgcccttgaccggaggaacttgtccctgttccaacatggcatccaccatggtgtcagagtaattcttttccttgatgaagttgacgaaggtatccttctgcttatctgtcgctttggaagaaagctgccagtagcttgacagatttccggtcagatcgcccatatcgcccttgcctccatcgacggaggggaacggtgcgaaaccaaggtcgtctgcggtgaagctgtcattgatggagatgaggtcggcgtacacccaagagcccatcaattccatacctgcttcgccggtcgcaatcatcgcggtatctttgcggtcgtcagcagtcaacgactggtagttgttgccgaaggcaccggcatcgatgagatcttgaatcatggacatcgcctgggttacggctggatcgctccaagcatctttattgccgtcgagtacaccttggaagacttcaggcccaccgatgcggtccacaagatatgcggcccacatcagatacggccacttgctaccaccggctagggcaatcggcgttttgccggcagcctttagcttggccactgcatcgagtaggtcgtcccaagtctggggagcttcgtcgactccagcatccttgagcacttgcttgttgtagaagaaaagcaccggctgcgcctgaccggtgggcactgcatacagtttgccgtctcggtagccttcggcggaaacggaatcgaacaccttgctatcaatagtgtccttaagatcgctagttaggtcggtaacggccttggaactgacatagtcggtgagaggagagccaccccagctggggaagaaggtcggtgcattgcctgagccgacggcggtacgaatcttctccttgtaagcatcattggcgaagctttcctcactgatctgagcatcggggttagctttgttccattccttgaatgcatttttgatcggatcccatggggaatcggtcattgcccaagtggtgacattggcgcccgtggcctgagtgttgccggtctggccaggcttattgccgcatgcgggaagcgataccaacatcgaagtggcggccagtgctgcaatggcttttgtcattgacttcataaggatctcctccttgagtccatttcctttttgcttaaggtgcatcttccgtcattggaattgtgtgtctccctttttcggaagatggttatactatatacttagtagttgctaagtgcaagtcgcttggtgacatactatgccgaatatcaatggtgagtgctgaaaggaaccaatatgacggacgccgcaaaaatcaaggaaatccacgtcgattgcaatgccttgcaaggaggagatggcgctcgcgacacgccggtgaataccatccaagcagcagccgatattgcccagccgggagatgtcgtcatcgtgcatgggggtgtatatcgcgagaacgtgaatcccaagcgtggcggatacgatgaatattcacgtatcacttacacggttgctgaaggtgagcatgccatcatcaaagggtcggagatactgggtaattgggatctggtcgacggcaccatatggcatgccagcgtagccaatgacgtttttcatggctgcaatccttatgccttgcctctcgaaggtgattggttggaacgtccgtccgattggaaacttagtttgggcaatgtgtatctcaacggcaaagccctttatgaagctcccagcgtggaagctgtgaaggcggcggagcggcgcgataccggattcggccccgattgggtcaatatcactgaaccggtggcacgcccggaggagaccatttatcagtggcatgctgaagtaggggattgcactaccgaattctgggttaacttccatgactatgatccgaatgcggaattggtggagattaatgtacgtcgcacatgtttcttccctgatcgaactgggctgaattatattacggtccgtggtttcgaaatggcgcaggccgcttgtccttgggcccctccgactggtgatcagattggtctgattggcccgcactgggcaaaaggctggatcatcgaaaacaacgatatccacgatgctcgatgcagtgccattagcttgggaaaggaagactccactggagataacgaagcaactcgatgggggcgcaagccagggtatcagacccaattggaaactgtgttcagggcgcggcacaacggatgggacatgggaacgattgggtcgcatatagtacgcaacaacactttgcacgattgcgggcaaaatggtgtggtcggtcatttgggatgcgttaattcgattatcgagaacaataccatctacaacatcggtgagcgccatgaattcttcggtcatgaaatcgccggtgtcaaactgcacgctgccattgacacgcagattcgcaacaatcatttccatgactgctcattgggcatttggttggattgggaggctcaaggcacacgcgtgtcttcgaatgtattccattccaatattcgtgatttgatgattgaagtgacctccggcccgtgcctcgtggacaacaatgtgttcgggtctgattacaacttcgacaatgtggcccaaggcaccgctttggtccataacctattctgtggctcgacgcaacgtcgtgccacgctcaatcggtttacgccctatcatctgcctcactccactgaggtcgctggttatgcctgcgtatacagcggtgacgatcgcatctaccagaacatttttgtgggtggcgatgcctatctgccgggtgtcacctctcgcggtactgagacttatgatggtgcacctactagtgaaaacgaatacatgaagcgcgtacatgcgcagggcattggcgatcttgagctgttcgaacaggtgccgcaaccggtgtatgtggacggtaacgtataccttaacggtgcgcaatcttttgatcgcgaagaacatcgattctctgacaatggtgatgcccatattgtcgtgactgaagacgcggatggttctgtgtggctggaaggagagattccttctggagtattcgaggttgatacctcatatatcgatacggcgaaactcggtgttccgcgtattgtctggcaacattatgagaaccatgacggtacgccgattgttatcaatcgcgatgtgaccggtatcgcacgaggtgcgcatcccgtgcctgggccggttgagtctctgaagcccggttcgaatcgcattcgcctcgcctgacgaatgtgctgtgtataggctggttgtctgctgtgatggcagaacggatgaccagcctatggaaaacatgataaggggttcaccatgaccacatggattgccaccactcaagacaataggctcgtcgatcgttcgggtgaggtaactgccactggtgcaaccaccgcacctgatttgcaactcgacggcaacgaataccaggcgctgcgcggtttcggcggctgcttcaacgaactcggctggctgccgttgcagaccgtcaccgaggcggaacgcgaccagatcatcaaggagcttttcgaccccgaagagatgaacttcacgttcaaccgtgctcccgtgggtgccaacgacttcgccgaccactggtacagctatgacgaggtcgacggtgactacgacatggagcacttctccgtggaacgcgacgaggagacgctcatcccgtacatccaccgcgcccaggaatggcagccggacatgaagctgttctccagcccgtggtccccgcccacctggatgaagcgcccgaaggcctacaactacggccggctcgtgcagaccccggaaaacctcaaggcctacgccaagtatctggcccgttacgtgcgggagtacgccaagcacggcatcgaggtcacccagctgcacgtgcagaacgaggtgttcgccgaccagaagttcccgagcgccctgtgggacgccgaagccctgaaagtgttcatccgcgactatctgggccccgaattcgaagccgccgggctcgataccgacatctggctcggcacgctcaacggcccggaagacatggcgtggaccggtggcggctacggcatgaggctcaacaactacaaccgtttcgtggacaacatcctcttcgacgacggtgcccgcaagtacatcaagggcatcgcctaccagtgggcgggccagaactgcatcgtccgcacgcacgaatcctggccggaaatcgaactcatccagtccgaatccgaatgcggcgacggccagaacacgtgggaatacgcggaatacgtgttccacctcatcaaccactacctcaagaacggcgcgaccgcctacacctactggaacatgattctcgacgaccgggattccacgtggggctggtggcagaactcgctgttcaccattaccgccgacacgcatgaggtgcgccgcaaccccgaatactacgtgatgcgccacttctcccagtacgtgcgccccggcgctaaagtgctcggcaccaccggccacttcaactccatggccatcgcgttccgcaacccggacggcacgattgccgtcgtggtccagaacgcgctcgaaaccgcaatgccgttcgagttcgccgacccggctgacgcctcccgcggcatcaaagccaccctcgccccgcgctccttcaacaccttcgtgatcgactagcgcccacgcccgtatcggtgcgcaggcagggcacaacgccctgtctgcgcaccgctttcgtatgttcggccgtgctggagtgtgtgggccggcgtgcgggagggcgggctgcggatagactggcgggtatgtccacacaagccacaacccggcccaagcgaatccgcaagttgccggaagagcgtcggcaggaaatcctcgatgccgccgtacgcctcatctccgaacgcgggtacaacggcacctccatacaggacgtggccgatgcggtgggtgtcaccaagcagggcgtgctgcggtacttccccagcaaggacaatctgctcgccgcggtgtaccacgagaactacaacatgtccggcgacatcgaggacttcatgactaccggtctgcccggctccacacccggcgacctgcggctgcccgcctacctgcggttcctagtgtggcacaattccaaacgccccatgctggtgcagctgttctccatcctgcaggtcgaatcgttcaaccccgaccacccgctgcatgacgaattcgcgggccgtcgggattcgatatggcactactattcgatacacgactggaacctgcctcccgaattcgactcgttcgaggagatccgccccacgttgcgccgcgccctggagatcatggacggggtgcagttgcgctggttgcgggtgccggccatcgatctcaacgacgaatgggctgatctggagcccatgatcttcccctcgccgctctgggacgggtaccgctgagctttcttgcgataggtgggcgttctggtgcttgcaggatatctaacagaaattagattgtcagaaaaccgtgtattcgcagcgtgtttcgtcattaggcatgctaaactaccaatcggtaactaaagaaccgttcgatttcaccgaagaaagcgacaccgcatgaccgacaacaccgcaacctccgcaaacgccgaaaccatgccgtacaagaaccccgccctgcccgccgaggagcgcatcgccgacctggtcggccgcatgaccctcgaagagaaggtcggccagatgatgcagctcgacgcacgcagcggcgacctcgaagacctcatcgtcaacaagcacgtcggctccatcctgcacaccagcccggccgacctgccgcgcgcggtgaagatggtcaacgagcagacccgcctgaacatcccgctggtcatcggcgacgactgcatccacggctattccttctggcccggcgccacgatcttcccctcccagctcggcatggccgtcagctgggacgccgccaaagtcgaagccgctggccgcgccaccgccgaagaggtctcctgcaccggcgtgcactggacgttctccccggtgctgtgcatcgcccgcgacacccgttgggggcgtgtggatgagactttcggcgaagacccgatgctgatcggcgaactcgcctccgccatggtcaagggctatcaaggcggcgccaaggccggcgaggccctgccgaagaacgcgatcctggcctgcgccaagcatttcgccggttactccgagacccagggcggccgtgacgcctccgaagccgacctctcccaccgcaagctcgaatcctggttcctgccgccgttcgaacgcgtggccaaggaaggctgcggcacgttcatgctcggctacgagtccatcgaaggcgtgccggtcacgttcaacaaatggctgctgaccgacaagctgcgcggcgcatggcaatacaatggcacgctgatcaccgactgggacaacgtcggccgctcggtatgggaacagcatgtcaagcccgattacgtgcacgccgcagccgatgcggtcaaggccggcaacgacctggtcatgaccaccccacagttctatgagggagccatcgaagccgtaaaaaccggtctgctcgacgaatccctgattgacgatgcggtagcccgcatcctggccctgaaattccgcctcggcctgttcgaagacccgcgcctgccggatgccgaacgcatcaaggcggtcatcggctccgccgaacaccagcagaccaacctggaactcgcccgcgaatccgtcgccctgctgcgcaacgacggcgccctgccgttcgccgcaaacaaggccaagcgcatcgctgtggtaggcccgcttgccgacgacgcccagaaccagctcggcgactggaccggcaactccggtcaggtctcttggatgccggatggccagcctcgaggcatgattaccaccgtgctcgacggcctgacccagctcacctccgacgattgcgaagtggtctactcgcgcggcgcgaacgtcatcgacctcgtgcctgaccctgccggcgagttctacccggacggccagcctcgcccgaaaatcggcgtttccgccgccgtcgatcgagcaatgatcgacgaagccgtggccaacgcccgccagtccgatctgatcgtggccgtggtcggcgacgtggtccagctggtcggcgaaacctgctccaccgccacgctcgaactgctcggtggccagaacgccctgctcgacgcgctcgccgccgtctcgcgcgaaaccggcaagccaatggtcaccgtgctcatcagctccaagccgcaggtgttgcccgcctccatcgtgggggagtacggcgtgttcgccaagcgcgtcagcgaccctgaaaccggcaccggctccatcctgtgggcgccgaacccgggcatgcgcggcggtcaggccatcgccgaaataatcctgggcctgaccagcccgtcgggccgactgccgatcaccttcccgcgccacgcgggccagctgccagtctactacaaccagattcgcggccagcacggcgaccggtacgccgacctcacccaggatccggcgttcgcgttcggcgaaggcctgagctacacgacgttcgcatacggcgaaccgaccattacgggcggcgcaagcaacgccgacggcacattcgccgaaaccgacaccgtacgtgccgaaatcaccctcaccaacaccggcgagcgcgccggcgtggagatcgtgcaggcctacatcggcgacatcgtgacctcctacagctggaccgaccgcgaattgaaggcgttccagcgcgtcgcactggaacccggcgagaccaagaccgtcaccttcgagatcccggtggcgaactgcacgatcgtggacccggacgccaaccgtatcgtcgagcccggcgaattcgaactgctcatcggccactcctcgcgccgtgaggacctgaagcgcaccacgttcaccgtggcgtgagtgagtctgacaatcgccgggtaatgacaaagtgggatgaggctcgatgccccatcccacttgttggcttgttgtactgttgcgatgttgctggtcagcgtcagtcggacgtttcagtcggacgtggtgatgtgctccacatcccagcgcacgccgagcacttcgggcgcgcaactggcgttcgagccctatcagcgcgcccagtgccgtgccgagcacaatgcgtacggtgcagtcgagaatgatggccagagaaaacgtggtgaacatgaggattcacctcctgaaaagtagacgtcaggaacttcccgcacgccctacagcgccagcccgcctcccgcaactacgtcgccgcgttcgggtggttcgggctccgtgcggtgagcgtgccgcggccgtatgatggaagcgcgggtggtccgggattttctgcatacggcgggaggcgtcatgattcctattgagaacgtgtacgaacagattcgtacgttcgccgctgatgccggcgctcgcaaggtcgtgctgttcggttctcgcgcaaagggtgtgaaccggcctaaaagcgatatcgatcttgccgtggccggttgccccgatttcaatcgcttggagcagaaccttcaggacaatctgtggtcgctgcttaaagttgatgtcatcaatctggatgagccgatttcttcatcgctgagggcggagattgagcgtagcggaaaggtattgtatgaaaaaatatgagaattacgcttccgcactgaagtcgctgcgcaaggctcccgaacaggatctcagcaatgatttcatccagagcggcatcattgacaagttcgagttgcagtttgagcttggtcggaaactgttcaaggcgctgctggcttatgagggagaccctgtttccgcttccggttctccgcgagatgtgctcaaaaccgctttccaatattacgatttcatggacgaatcgttgtggctgcgtatgctgcgcgatcgcaatgattctgctcatatctacgatgaggaacacgcccggcggcttgtggatgccatcatcgttgattacatccccgaatttgagcgtgtgaatcaggggctggtcgttcgttacggcgaagcattgaacgattagcgcgggtggcattaatggcactgggcgcgctgggcattggcgagcaaattaatggggtgaacctcggtaactggctggtgctggaaaagtggatgaagccggggatttttgccgccagcggcgaagcggacgagatctggctgcatcgtgctacggagtctgctgagttggaggctctgctgacgcggcatcgcgacacgtatatcactgaagctgattttcggaacattgccgcgcatggctgcaatctggtgcgtattcctgtgccgtattttatcttcggggatgtgtccggtcatccgggctgcatcgagtatttggacagggcgttcgactgggccgagcgtaccggtctcaagattcttatcgacctgcacacggtgcccggctcacagaatggattcgacaacggcggcctcaccggcgtggtgcgctggcatcatagcccgcgagcggtcgcctatgcgttgaatgtgctggcctgtctggctcgccggtatcgcgatcgcgcggcgctgttcggtatcgaggtgctgaatgagccaatcgattggttgacgtatgctacgtcgtcatcgagcaggcaggcaaaggatagctttgaagcatggaggagtgggccgattccaatggtgttcctcaagcgtttctaccgtgagtcgtatcgccggttgcgcccgattttggccgagaaccaagccatcgtgttccatgacggcttccgactgggccgttggcgggactggtttgtgcgggagg

SEQ ID NO: 3108 - DNA, 11554 bp, Unknown
  R215_18m  MAG No. k141_12927
acgcgtcggctatgaaggcgtcggccaggccaaggccgtcgtgttcttcctgatcgtcgccgcagtggctctcattcagaacagactcaccacgagcaaggaggtgacggcatgaacggcgacaagatgaagcacggcgcattctggaccgtcctgttcaccctgatctccttggcatgggtgtacccgatcgttctggtcgtcatcaactcgttcaagcagaaggcgtacatcagccgggacaccttctccctacctgccggcaaggcgttcgttggcctcgacaactacgagcgcggcatccagcgcaccaacctaatcgccagcttcggttggaccctgctcatcaccatcggtgcagtcctgctcatcctgttctgcacctccatgtgcgcctggtggatcgtgcgagtcaacaacagaagcgccaagttcctgtacaccctgttcctgttcaacatgattgtgcccttccagatgatcatgttccctctctccaaaatcgcggacatgatgggcctgaataccccgtggggcatgtgggttctctacctcggcttcggagcgggcctcgcggtgttcatcttcaccggcgtgatcaagggtctgcccgcagaaatcgaggaagccgccatgattgatggcgcgagcgtgccccgcacgttcttcaccgtggtcctgcccatgatgaagccctcgatcgtctccgtggcgattctgcagaccatgtggatctggaacgacttcctcctgccctacctcaccctcgacttgagaaagtacaagaccatgtccatcgcggtccagtacctcaagggaggctacggctctgtggacatgggtgccatgatgggctgcctggtgctggccatcatcccgatcatcgctttctatctcgtctgtcagaaatacatcgtcgccggcgtcaccgctggcgcggtcaaaggctgatattcgcaacaaccgccgccggtcaaagaagccggcggaccaccccccatgaaaggaaaacaaccatgaagaagcaaatcacccgcgcccttgcggtcgccgcggtgctcaccctgggcgccaccggtctcgctgcctgcggttccagcaccaatgtcgacgaatcgaagggcaaggtctactacctgaacttcaagccggaatccgccgaccagtggaaggccatcgccgagacctacaccaaggagaccggcgtacaggtcactgtggaaaccgcggcctccaacacctatgagcagacgctgaaatccgagatggccaagtccgaggccccgaccctgttccaggtcaacggtccggtcggtctggccaattggaaggactactgcgacgatttgaccaatacggcaatctataagcagctcaccgatcagggacaggcgctcaccagcgatgatggatcgcagattctcgccgtgccgtacgtgcaggaatcctatggcatcatctataacaaggacctgctcaaccagtacttcgacgcctcctggtcgtccgtcaagtccattgacgaccttaacaacttcaaggcgctgaagaccgtggctaccgagatccagagccataaagacgatctgggcgtcggaggcgccttcacctccgcaggcttcgactccagctccgactggcgcttcaagacacagctggccaaccagccgctgtacttcgagttcaaggacaacggttccaccaccacgcagccggccaccgtcaagggtacctatctcgacaacttcacgaacaacttcgacctgtacatcaacaactccaccaccgataagacccagctgagttccaagaccggcgatgatgcgaactccgagttctcgctcggcgaggccgtgttctaccagaacggcacctgggcctggaccgatatgagcaacgccggcatggaagcggacaacgtgggcatgctgccgatctacatcggcgtcgatggcgaggagaaccagggtctaaccactggctccgagaactactggtgcataaacaccaaggcctccgatctggacaagcaggccaccgcggacttcctcgaatggatgatcacctccgacgagggtaaaaacgcgttggccaccgagatgggcttctccacgccgttcaagaccttctccgatgtgaccaccgacaacccgctgatcgatgcggccgccgcatacaccgaagagggccgcgagtccgtgacctgggcgtacacgatgattccgtccgagcagtggaagaacgaccttggttccgccatgctcgagtatgcgcagggcaccggcagctgggataaggtcgtctcggccttcgtcgatggctgggcttccgaatacgccgcctcccacgagggctgatgccctctccggccggattccccgacctttaatttgtccacgagccgtccgttcccctttctctttccaggcggctcgtggcctttttgttgtgccgccaaggcatacgaaaaccgccgctcccgtatgggcgggaacggcggtttgctagcttaaatccccttcaggggcggcaatcactgaacctgggtacgagcgatcttgccgttgaaggactcggcctcgtccttgtccttggcctcggcgttgttccaggagaacatggcgcgcagcttcgggccgacggtctcgaggtgcgggtgagagtactcttcctgcagcttcttgaacttcggggcgccagcggcctggtcgtccatgaactccttggcgaaggagccgtcctgaatgcgcttgagctggtactgcatgcgcttcttggtctcctcggtgatgacggtggaggtgtagtcgccgtactgagcggtgtcggagcaggaccagcgagccttgttcaggccaccctcgttagccaggtcgaccagcatcttcagctcgtggaagacctcgaagtaggcgatctccggctggtagccagcctcagtcagcacgtcgaaaccgaggtcgcacaggtggttgatgccacccatgaggacgtcctgctcaccgaacagatcggtctcggtctcctcggtgaaggtggtcttgatggcgcctgcacgcagagcgcccagagccttggcgtaagccaggcacagcggccaggtcttgccgtccgggtcctgctcgacggcaacgacgaccgggacgccacggccagcggcgtactcacgacgaacgatgtggcccgggcccttcggggcaaccatgaacaccgggtgatcctcggacggcttgatgtagccgtagtggatgttgaagccgtgggcgaaggccaaggcagcgcccggcttcaggttcggctcaacttcttccttgtagaccttggcctggtactggtcaggcagaaggatcatcacaacgtcagcctcggcgacggcctcgccaaccggcttgacctcaagaccctgctccttggcgaactcgacagacttggaggtcggacgcaggccgacgaccacgtcgacaccggagtcacgcaggttcagcgcgtgggcgtgaccctgagagccgtagcccaagatggcgaccttcttgccatcgaacacggacagatcggcgtccttctcgtaccagatagttgctgccatttttggcgctccttttatttatttgtttatgggggtgaaatctttaattgttattgtgctctgctggttctgcagaaactgtttttagttgtggctttccttgtgggcttttccgatatgcaggtttagtcctgttgcaccggaaaagcctcgtaggggttcacttcgtggaattgagatttttcacgttgtgaacttggcgatatttagttatggaggatttcacttggtaaagtcagcgtccttcgtctcgcggcaggtcaggaccgacaccaggcagcacacggccatcacggcgaggtagaggcccacggagtgaacgccccaatgggagctcagccaagtggcgatggtcggcacgaacgccgcaccgacgatggcggccaggttgtagccgatgccggacccggagtagcgcacgttcgcctcgaacagttcaggcaggaacgcgccgatcgggccgaaggcgacgcccatcagggcaaagccaacgcacaggaacaccatgttggcgaagaagttcttctggccgaccagaccaccgtccagcaggaacgggaagagcacggcgaacacgacgagtgcgcaggaggagaaggtcagcacgcgcttgcggccgatcttgtccgcgtacaggcaggacagcacgatgaacagggcgaacacgcagatggagatcatgagcatgagcaggtattcctggttggtgaagccaaggccgccgccgccttcgccctgctccttggtgccccaagcgagggaccaggtggcgagcgtgtagaacagcgtgtaggtcacggccacgaggaaggtggcctgcagcacctgacgccaggacttgcggaagacctcggtcagcggggacttgacgaccttcttctgctcctgggccatacggaagatcggggtctcctccatgtgaacgcgaaccacgaggccgacgatcaccaggatggcggacagcaggaacggcacacgccagccccaagccagcatcgcgtcctgattgttgaaggattcgagcacgaagtaggtgccgttggacaggaagaagccgatcggggcaccgagctccgggaaggagccgtacagtgcgcgcttgtcttcaggcgcgttctcggtggcgaccagtgccgcaccggaccattcgccgcccaggccgatgccctggatgaagcgcagcaggcagaggatggcgactgcgccaacgccgacctgatcgtaggtgggcaggcagccaatcaggaaggtgccgacacccatggtcatcaggctgacgaccagcgtggtcttgcggcccatacggtcaccgaagtggccgaacaccagcgagcccagcgggcgggcgatgaaggcgatggcgaaggtcagcaagctcatcagcagtgcgacggtggggttgtccttcgcggagaagaagatgtgcgggaagtagtttgccgcggcggtgccgtaggcgtagaagtcatagaattcgatggcggtaccgaccatcgatgcggcgatcacggtcttgaccgaatcgcgtaccaaggtagcggctttacctgccgcctgccctaagccagtctcttcgactgctgcagtcattgttactcctgttttgctctcgttcactctcattggcgggcgattatttcgtctcacagggaggttgttgttctgttgctgtgttgttgccgtgtactgtccgctaccgtttccgtctgcgggattctgccgtaagccttgtgagcgcaacaaaaaaagccccgcaacttgcagggccttaccgattgtgtcagcttgattggccctgccttcgttgacggggcttcaagcatcaatgccgaattagtccgccagcgaagacgggctaataattcgtgcggatacaaacgcagaagcattgaatccagtcatcgcgtggcctcctttcggtatttcctcaggccgttcgacctgaactggaatgtaaacataggtttggctgtcttgccaatccagcaagggttcacattgtggacgccacgtcgccgagacgaacgcccccgccgcggggaggaacgccgccggcggccggggagccggaccggcccgtcattgcgcggactcggcggcgagggtgacgattccggccagcagcaccatgacgatggcggacgggaagagcaggtaatagccgaagctgtgctcgaaggcgttcaccagtagcgcgccgatgatggcggcgagcgccagaccggccgagttggcgagcgcataaatgccgaggtcgtggccggctcggcgcgggtcgggcaaagagtccatcaccagttcaaggcctaacgcatcgtagacgccgaaggcgaatccggagatcagcgcgaagagcagcatgccgttttcgcgtgccgtgccggtggaccagacgccgagcccccatgccaccgccacgccgatggcatacagcaggcaggatgccgccaccactgcagtggtggcgatgttccgttcctcgatcttctcggagatcggcccagcggcccaggacgcgagcgcagcaccgatgagcgttgccacggccatgccggcgatgaggaggcccgcgggaatggtcaatggcgcggaagtgaacaccacagccttgccatacacccaaaagcgcacgagataccacagaaagaccccggtcagtccaacgcccgtcatcatgcacacgcgagcggcgaacacacgggcgaatgcagacgcatgtgccggcggacgcagctggtcaaacacctggctcgactcgaatcgttgatgtggctgctcctggctggaaggctccttgggcagcatgatcacggtcaggatgccggaaaccgcaaacagcacggcggtgtaggcaaacggcgtgaaggagtcgaacatcacgccgagcgcacccatgcatacaccaagcgcttggccaagcatcacgccgataccgtgccagcgctcaatgcgcggacggaatttgtccggaacccgttcgctgatggcgctggccaacggcacggaaatcatcgcataggcaaactgcatgagcgcccagaagaaacacagcactacgaggcctgtgttccgccccagaaccagcgtgatcagcgcgcacagcacgccacccgccaccatccacggggtacggcggcccagaggaatacgtgtgcggtcggacagcgcggagaccaagggcatcgcgaacatggaggccaccacgccaacgaccaccagcacggccagaggcaccaccaagtcagtggcgacgggcagcggacggccggtggacggattgatggtgaccgatatggcagaagcggtgtcgtagtcgaacaaacgcgccacggcgttgggcatggcgatggtgttcaatgctatccaaggtgcgccgaccagaatggaagcggcgaagaacccccagttgagacgggatacctggcccgtggtgggtcgctgaccattggcggcgaccatcggatcgcgcatatcgagatatgcagacgacagatcaggcgcaggggcatccacgctggccgcggcagcggcagcagccgacgaaccggcggccgccagacgcacggcctgggcctcgggctgatcggcggatgcctcgggaggacgccgacgatctttgatggccagtcgggccacggcatccttgtcttcgggactcaatgccttgtcgagatccgggcggtcgtcaatacccgggcgcacgtacggttccaacatgttgctgctctttctttgctctcatcaccggcgggaggcaccggccagctccgactgagcatgacccgcaaccccgccacatgcaaaaccgcccgagcgcactagcttcagtgcactgcgggcggtttgttttccatggacccagcttacgccggacgcactacttggagcgcgcacagcggagtggcgtttatgggccaacggttagtcgatatcggcaatcggcgggttgctcagcagatcatcagtctcgtggtcaccggcggcatcggtccaggcgaggctggcgaccggagtggtgttatccgtgccgagtccgcggccgggctcgaagatgagggcggccttggtcttgccgtcggcagcgatccagcggaaggtgatggatgtgtcgccgtcggcttcgtagctgaactcgccattgaatgcaggcagttcgttgcggaacttggccagggcgttcagggccttcaccaccgggcgctcgaggttttcgtcgatttcggcggtggagtagtaatggcgattgatgtcacggccgttgttggtcttgcgcagcagttccatgtcgttgcggccggcgagcgcgcccacgtagtagacctgcggcactccgggcaggaagaactggactgcgcgggcggccagatagtgctggtcgttgcagccgagcgcggagtagtacgtgctgttgacctgatagaggtcgaggttgctggcggcggcaccggtggcggcctgggattcgccgtgggtgttggcgtggatggtgttgaccagattatcgacgtcctcgtcgggcacgaggcccttgaggctgcggtcgagctgatcggagccgatgtcgatcacgccgatgccgtcgtgcgtatcgagcacggtgacggcgttgttcgggcggatttcggtccagtggaccacgggttccacgtgaccggtgaacagcgagtgcaggagcagcggaggcagggcgaagtcgtagacgcggtccaccttggaggcgatttcaacctgcttcttgtagtagctatgcacctcaatgagaatttcgaggcctcgcttgacgccttcctcgcgtaggcgggagatgagcttgaacgtcttcggagtcatgaagcagctggtgccggcctccttggcgccgtagcccacggcgtcgagacggatgtagctgacgtgggatgcggccatctgatcgaagatggacatgaggtattcccagcccttgtcggaatcggtgtcaatatcaacctgctgcggagtgaagctgacccagaccaggcgggtcttgccggcgaacttgtagtgggtgaacggcaggcccgggcgcgggcggtagatgccggccagttcctcttcggtggcgccgttcgggaagacggagctcatggtcagaaacatcgggtaatactcggattcctcacctttttcaagcacgtcttggaactgcttggattcccagctcatgtggttgacgatggcatcgaccatgatgccgtgggtcttggaaagttcagcgacgtcgtcccagctgccgagacgcgggtcaactttggtgtggtcgatcgggtcgaagcctgcatccgcaccatcgaacggagtgaagaacggcaggatatgcacgccgtcatacacgccgtcgaagcgggtgcgcaggatgtcggtcatcgagctaagagtgccatcgccgagacgatcggcgtaagcgatgagctgcactttgtttttcatgggacctcccttggttcatggatgcaggtgcaatgtgtacgcagtgtatgcgtgcttttacatacttatacgtatcgaaccggtttgatattacctcgaaagggtcgttgatgtctagtaataccgcaaaatgcgcgtgtcgaaccggtttgatgcggtgttctacacaacccagcttgtccggccccaatgtgtccgttgctgcaaaatcggacatccaaacatctcacgcatcacacatgaccgattctccggaatcggacacacagaacacttttttcggaactcagacgtccgattcggcagaatcggacacatgtgcacaagtcggatgatgagcacgaccatcgacgggcgttcgccggttgtggacgccgctgaaatcgatgcgatccacaccgggcacacgcatgaagacgcgcagcatcaacgcgtggtatcgcctggcaccagcgtcatgggaataagcacgttcggctcgaacggcttggggatgttcctgcgtgaagcgttagccgcagccacttcctcattggcaatagcctgcacgatatggtcggccgccgactgtgcgatcgccgagaaatcctgcgcgaccgcggtcagcttcatgccagccaaatcagtcaaatacgtaccatcgtaggcaacgatttgcagctcgtcaggaatggaaattccgcggctcaacgcttcgcgcacgcagaacgacgcaccaatgtcggaactgaccacggcatcgacgccgtcggtcgccaccttgtcgagcgcattgctgaccgcacgatgacagccggcgaaatccatcacttcgccagcttcaacatactcgtatttcacgcctgcggaggtcaattcctgttccaacgtgaggtagtagcgcaccgtcgggaacgtggtctttcccaaatcgaacgatccttcctcgacttctccgcgcgcagccaaatcgaagaattgatctcgcggaccgccaatcatcaccacatgtttggcaccattgcggatcagcatctgcgcaatcaatcgcccaccctgctcgtggtcggatccaattgacgaaataccgtctccaagcacacggtcgaacgcgacgatcgggcgatgaatcgacgtccaataatcgccgggatgcgaagtgtgcgcacacatgacgatgccgtccatcatgtgccgacgcaacatgtcgacatactggatttcgccctccgcctcatctgcggtagagcacaacatagtgcgtaatccttgcgcggcgagcgcatgctgcagatgtgcggtaaacgttgcaaagaacgggtggcggatggtgggcacgatgacgccgaccagattcgtacgatcatgatacagattgcgggcaagctcgttcggcacataattgagcagttgcatggctttgcgcacacgttcgcgcatgtcatcagacacgtacccgttgccgttcaccaccagcgagacggtgctcagagacaccccggccttcttcgccacatcgcgcatgccgaccatgatcgcaccttccccgtcatcactgttctatcgctgtatgctcacgtgcttaccgcgaatattacattcatttacattctctcgaacctgttcgacagtccggtgtgtatatcgtttgacgggggcgcccctcactttatttccatcatgtgtttttttgatgatcccttgaaatcacattcatggatcacttttgcactgcagtcgataccgcatcgatggaagatacatcatgcacaacatcttgcaaaacatcacaattacgtacaacgaaagaaacggcgcaaagcttgcgatatccacgctcactttgcgccgtcttcttgtattgatgatggcctacattgcgatcattgcgatcagtcggtcggaacgtcaccagactgcgtgtggtcaaagaccggcttgttgtctttgtcaaaggtgtagacgccgatattcgcagaactcggatcattgttcttgttgaacggtccaatgccggtctggccctgatactggatatccttgccatccttcagcagggcgaggcaggccttgtaggaatcgcacttctcgccgccgtcagcaccggagacggccgccatgttggcttgaatggtcttgccgtcagcgctgccgcccttctgcgcggcgagggctgcgaggatgatgccgtcgtatgtttcagcgccataggtggtggtgtttttcagatccacaccggtggattcaagacgcttgacgaagtcgtcagacgggttgacgccaggaatggtgcctttcgaaccttccagcaggtctgcgtcgagttcgctcgaatagtcggaggtgttgccatccacgaagtacagtttcttggtgtcaaccccggcggaagcgagcgctttgagcaacggcttggtctggtcgaaggcgatgacgagcgtcgcgtcggggttggacgccttgatggcggtggcgattgaggagaagttcgtctcggtcggatcgaaggtgtccttttcgccgtagacgatgtcgacgccc

SEQ ID NO: 3109 - DNA, 14899 bp, Unknown
  R215_18m  MAG No. k141_13846
ggcaaccggccatggccaggtgctccgcgcaggtctcatacccgtgatcgctggttctcgcatagtacgtcgcacacattatcgtcacctcgtcaatcgctccgtatcgcaacgccatcgtcgcagcgcaagcataccacgaaacaaaaaagtggtcccgccgctaaacggcaggaccacttcgtgcatttcacgcgcccgtgcaccacgcatcaggcgcggtcagtccgccacggcatcacgccttggcgacctccacacccagctcggcgccttccttcacttcgaaggaggtagccagcgtctcacgggcgatcagatccttgaactgctcgaccttggccacatcggcggccggaacggtcagcaccagggagatgcgatcggcgatgtccagatcggcggccttgcgggcgtcctgcacggcgcgaatggcgtcgcgggcgtagccttcagccagcaggtcgtcatccagcgcggtgtcgaggatcacgaagccaccggtcggcagagcggcggagaccgaagcggcggcctcggtggcgttctcctcctccacgcggttgatcagctcgtactcgccttcgaccagcgcaaggtcgccggacggcgtggagaccaccggcgcaccggacgcagcatcgacatgccagtcgccggacttggaggccttgatggcgaactgcacctgcttgccgaggcgcgggccggcggcgcgggcgttcaccttcagctcgtgcacgatcttcagaccgtgggcggcggcatcctgcagcgtcgagaactcgatgttcttgatgttgagctcggacttcagcagatcgtcgtacgccttgacggcgtccacgttctcgaccaccacggtgagcttggaaagcggctggcgcacgcggatcttggcggccttgcgcagggacagggtgccggagacgacctcacgcaccttctccatcgcgtccaccagagccggatcgtcgaccagcacacggccgagttcggtgtcttcaccggtcttctcgtccaccacgaacggccaatcggccaggtgcacggactcgccaccggtcagaccacgccacacggactcggcttccatcggggccagcggcgcaagcacgcgcatgaacgcctcaagcacggtgtacagcgtgttgaacgcggaagcgtcctcattccagaaacggtcacgggtgttgcggatataccagttggtgagcacgtcgatgaagtcggagaccgcatcgcaggcgtcggagattgcgaactcgttcagcgacttctcggcggccagcaccagacgacgggtacgggccagcaggtagcggtccatctccggcagaccggcgacctcgtccgcgcgcagctggcgagcgtcgaagccagccccaccgttggccgcgttggcgtacagggtgaagaagtagtaggagctccacaccggcagcatgacctggcgcacggtgtcgcgaatgccttcggcggtgacgatcaggttgccgccacgcaggatcggcgaagacatgaggaaccagcgcatggcgtcggaaccgtacttgtcgaacacgccgttcacgtccgggtagttgcgcaggtgcttggacatcttctggccgtcggagccgagcacgatgccgtggcagatcacgttcttgaacgccgggcggtcgaacagggcggtcgccatcacgtgcagcaggtagaaccagccgcgggtctggccgatgtattccacgatgtagtcggccgggaagtgctgttcgaacttctccttgttctcgaacgggtagtggaactgcgcgaacgacatggaaccggactcgaaccagcagtcgagcacatcggaaatacggtgcatgtgcgacttgccggtcgggtcgtccgggttgacgcggaccaggttgtcgatccacggacggtgcatgttgatgttgccgtccttgtcgcgcggatagtcgccgaagtcggccttgagctcttcgagtgaaccgtagacgtccacacgcgggtacttcggatcgtcgctcacccacaccgggatcggggaaccccagaagcggttgcgggagatggaccagtcgcgcgcgttggcgagccacttgccgaactgaccgtccttgacattgcccgggatccagttgatctgctggttcaattccagtagacgcggcttgatcttggtcacggacacgaaccaggaggagaccggcttgtagatcagcggggtggcgcagcgccagcagtgcgggtaggagtgcacgtagctcttctcctggaagaggatcgcgcggcgctcttccggaatctcggcgagcgggccgtcgccggcgcgcaggttgcgcaggatcggcaggttggcgtcgaacacgaaatcgccctcgtagtcagggcactgcgcggtgaagcggcagccatcgtcgagcacgtcggtgctcttgatgccgtgcgcgttcagcgtattcatatcgtcctcaccgtagggagcctggtgaaccaggccggtaccttcgacggtgtcgacgtagtcggcggtgaagatcgtgtagccgttcgggccgggcacgtggccttcggattcggcctcgtcacccgcgaagtacgggaagaccgggtagtagcgtcggcctgccagctcgttgcccttgagttcgcgcacgacctcgtaattctcgccgagttccttctcgtaatgcggcagcaaatccttgccgaggtagaacttcttgcccgcgaacttgccttcggtcgggcggacctcgacgtagtcgatgtcggcgccgaccacgatggcgaagttggtgggcacggtccacggggtggtggtccagaagacggcgtaggcgtcgtcctcgtcgcgcatcttgacggccacggatacggtggtgtcctggcggtcctggtacacgtcggcgtccatgcgcagctcgtgcgcactcaacggcgtgcggtccttcgggcagtacggcagcacgcggtagccctggtaggccaggcccttgtcgtagagctgcttgaaggcccacatcacggattccatgtacgggatgttcagggtcttgtagccgtgctcgaagtccacccaacgggcctgacgatgcacgtagttctgccattcgttggtgtatttcagcacggaggcgcggcaggcgtcgttgaacttgtcgatgcccatcttctcgatctggtcgaccgagtcgatgccgagctccttctgcgcctcaagctcggcgggcaggccgtgggtgtcccagccgaacacgcggttgaccttgcggcccttcatggtctggtagcgcgggatcacgtccttggcgtagccggtcagcaggtggccgtagtgcggcaggccattggcgaacggcgggccatcgaagaacacgaattcgttctggctgtggtcgccggaagggttgcgttcaacggactgctggaaggtgtcgtccttgtcccagtagtcgagaacggtctcctccatgtcggggaagctggggttcggcgcgacgtgcgcggtctcgccgccctcgctcgccttgggatatacgttttcgctcaccgtaaatctcctgttagtactgtgcactggtcctacaggagcgtcattgatggcgattgccgggcgccgacgtgtgccggctggtttcacgaatgtcacgtaccgaaccgtgggccgattagtcaatcgcctcgcagccggaaccgactgtgttccgcccggaacagccatgtctgccgttcctgcctacgaggacgatgacgagcgctggtatgcgctccgcaccgcggtaccacctcgattatcgcaccggttgcgccgctccgaactgttgcactcggagccgcgagcctgcgcgaccgcttgtgttcggctgtctcgggccgatcccgtcggttctactgggcgattgccgccgttcttccgaagactccccgctgataacggatcactgcctcacaacggtgcatatcctaacacgccacgcggtcaaatcgccgcccacggccacggcaccgtcaggagcccgatttagattgggaccggccaccacggaccgagaaaggattgtcggacaatgacgtatgatttcacgtccatcatgaacaggcatggcatggattcgatcgcggtcgacggactgggcaccgacccgggattcgcgccggacccgccacgcgagggtttcgacgtcatccccatgtgggtggcggacatgaacttcccgaccgtgcccacgatcccgcaggccatcatcgaacgggcgaagcatcccgcctacgggtacttctcccccaccgacgactattacagctccatcatcgactggcagtccacgcgcaacggggtcaccggattgacccgggaggcgatcggctacgagaacggggtcctgggcggtgtgatcagcgcgctgaccgcgttcgccgcccccggcgacggcgtgctgctgcacagcccgacctacatcgggttcacccggagcatcgaaaacaacggctaccgcatcgtccacagtccgctcacgctggacgagcgcggcgtatggcgcatggattacgaggatatggacaggaagctcaaggagcatcacatccacgtggccgtgttctgcagccctcacaatccttgcgggcgtgtgtgggaacgttgggaaatcgagaaggccatggaagtgtacaaggccaacgattgcgtggtcatttccgacgagatttggtccgatttgactctggggaaccaccagcacatccccacccaatcggtcagcgaggacgcacgcaacaggaccgtggcgttctacgcgcccagcaagaccttcaatctcgccggactggtgggaagctaccacatcatctacaatcccacactccgggaccgcatcgtggccaaaagctcgaaatgccactacaacgacatgaacgtgctttccatgcacgcgctgatcggcgcctaccggcccgaaggccatgagtggctcgacgaactgaaggcggtgctcaccggcaacgtcgattacgcctacgactacatcaccaagcatttccaaggagtgagtttggccaaaccggaaggcacctacatgctgctgctcgactgcgagcagtggtgcgaacgccacggcctgagcctgcccgagttggagaaacgcggctgggatgtgggcgtcgcatggcaggacggcgacatgttccaggccccctacagcatccgcgtcaatctcgcattgcccttgagccgcgtcaaggaggccatgcgccgccttgaccaatacgtattcaacgcgtaaacggcatgcatccgcgattgcggtgtcctggaaagacgaatgccgtcaacgaggttggtgcccgttggcggcattcgtcatacgttggccgaaccgggcgaaacccaagttgccgtgcgctatgaggtggatgccgccagcggacgtgtacatctgaccgcccgatatgccggtgccaccgatgcgccgacgctgccggcattcggattggaatggacacttcccaagcagtacgagaacctgcgcttctacggccttggccccgagggggcctatcacgaccgtctgcacggtggcaagctcggcattttcgagcgcaccgcagccgaagacaatgcaccgtatctggtgccgcaggagaccggcaaccatgaagacttgcgttgggccaaagtgcttgacgcccaaggacacggcatgcgtatcagccaggccggcagcgaacatttcgcggcgagcctgttgccgtacagctcgctcatgccggaagaagcgacccaccagaacgagttgccgccggtccgtcacacgttcctgcgcctgttggccgcgcaaatgggcgtgggcggagacgattcatggggcgcgcccgtccatgagcagtaccagctgcccgccgatcgcgcctacacgctcgacgtgaatctggaactgttctaacagcgataaagaagctctctctgacgagggagcttctttatcgcacagagggagcttctttatcgtgctggtacgaaactgtcacgcaccactagggtggtggagatgaaggtatggtggtgcagcgtgcgccgactggagatggcctcggcaagcatcgtaatcgcagtatcggccagctcattctggtcgatatcgtaactggtcaatgtcggcgaagtgtactgggcgatggcctggttattgatactgatcacactggtatcgcgaggcaccagcactcccgcagcggtaaacgcctgcagtacgccgactgcaatcgagtccgcagccacgatgaacgcatccggcatgtcatctcgatgatcgttaaccgcttcctcccctagagtgcgcccggtgtccacagtgaacgcgccttgcgcgtaaatcaggccttccgcatccagccccaaacgctcggtccaattgcggaatgcggttaatcggccgtcttccggatattcgtgcaaacccatcgtgaagccagtaccgccgatatagccgatgcgtcgtttgcccgaggacaccaacatatccaatgcgtccaaaatggtttggcttaaatccggttgtaccgaatcgaacaggctgggcgcaggattggtgtcgatgaatacgccatagggcaataccagatggagcttcaacagtctatccgaagagagtacggacggtccgatggagatgaagccgtcgaaatcaccggcgtcggcaatcagatcgtcgatatgggaaaacgacgtgagttccatgtgctgggctcgggcattgtcgccgagcacggaccgtagttcatcgaaataggcgtccgccagttcttcctcgcgggtggcgttgtcgagtacggccacacggcgtggcaatgcgatacggcgtgatccggtagcgtagccaagctgctcgctgacctcgatgatgcgacgtcgcgtctcctctttgacagacaatgtcggatccccattgagcagccgggataccgtggcctgcgagaagcctgatttctgtgcgatttccttcatcgtgaccatagttgagccttccacgcctcagtacgtaacaatacgcagtatttcagtaaataactttactacatagtgtaactcacgtcatgcgggtatgacgccgtatggttgcagcatcgtcgatccgcagcgctgatgagaacgtgcatgtttcaggccctccgataattatcgggcaggcgggaatccccagaccgtggagtcaatgcgctggattttcccggacttgtcaaagacaacggtgatgtccggcgcagtaaaactgccggtcgaatccccgaatcggtacggatcactccagtcgataacggcatgcatcgtcacggtccgagttttcgcgtcataggactcatccgagtactcgatactgttatgcgtggccgtagtcccgcccagaccgccgccattgccttgatgcatttgctgacaatacttcgtaaaatccgcgccgagaacattcgacactgcatagcgcctaaatgaacgtgttaggtctgcaccaattcacggccggcaatactccacacttctcagtaatcaattcgtaccaaaccgctcacgaatctgagcagcagtaccataagaggcttgcgcaccgaccccagtcgcggcgtacgcggaaacgtacgaggccaactgcgcactgtccgccaacgcatgacccgaggcaagtccggccagaaccgtgcccataaaggcatctccgcacccggtagtgtcgatggccgcaaccgcaactggcgcaatacgatagatatcatcaccatcgatgaccaccgacccatccccgccaagcgtaattaccgcctgattaaagccgaagtcatgcatctgccgcgtctacggtgatgaccgtggtcccgctggccccatccacgtgccgaatataactggtgtccacaccggtatcgttcaatgcttcaagcaaaaaatccgcattagcgtcggaaccgagcacaccaaacaatcggactttggctccaagacgagcggccgaaacagcctgattccccgacttgccaccaggaagcacccgcaacggccctcctagcactgtctccccccggtttgggcagacgctcggtggtgacggtataatcggcattcatcgagccaacgacggacacggccccatgaatgcaatcaagagaaacaagcgtttcatccatagcaggcatgatattccctttctgaatgatagatgctgctggtgcggtagtctgttcgatcaacatgctccgcaccagcaggcgcaatcagacattgcgttttgccgtaaaatcattacggatacccgtttccaacaacacattgccataggtaccggtaataccaatcagttccgcgtcttcggatccaaggatgtatgacaatgccaaggtgtcgtcaatgccggtatccaaatcgagaatgatcttcttcatgatgttcctttccatcagcttccttgccgaaaaatcggagacgtcttccatgaccgtctcctcacgaccaagccgaggccttgtcgccgtcacaagatttaacgttttatcaagtgatgggagtaatgataaaacgttaaatcatcgttgtcaaaatatagtcttctgcgtgtcacgcatacggacaaagaagtagtagaagcaggaaaatactgaaacaatcagccggcgacggctgcggaggggccctgcttcacagacccgcggttgatgaacatcgtgggcacggaatgggtgacgccctcatccgaagcaccagagcgaatacggcacagcagcaaatccacgccctgccgccccatcagctcggcctgttgggaaaccaccgcgatacgcggtgtcatcaaggtgaacgccgcaatgtcatcgaacgacaccagcgacatatcctcacctatcgaaaccccacggtcgtgcagcacaccaatcatcgtgagcgcatccggcgagtatgcgcacagcatcgcgcttacgccggcatcaagcaacgactcaaccgctgccgtacgcgattcataagtggagtcgcaagcgactaccacgccgttaccctcgataagcatatccgacgcaaccgcacggaatgcagtctctcgttcgttgacgctgaacgaccctaatgagggatgcgacacatatcccacgcaacggtgtcccaaacgtaccaattcctctaccgcctcgcgaatgcccgtatacggattggaaaccacaaacggcaccgattcgacgcccggcacacgccgatccacgaacaccaatggcaaattacgtctaatcaacgactgcaccccgggtgactccacaccttgcggcaccacgatcgcaccatcaatacgctgcccgagcagattgccaataaacgcatcctggcgttccactgtttctgctgaagtaccaatcagcgtggaatagccccgggcatacaactcatcctccattgacgagaccaaatcggcgaaatacggattgcgcaaatcaggaaccagcaaaccaacagtcttagtatccgacgagcgcatggagcgagcacgttgatcgggcacataccccatttcctcaacagttttcagcaccaactgtcgcgtatcgctagaaaagcggcctttattgtgaagtatttgggagacggcagcagccgacacaccggcacgttgagcgacatccttcaacgtcacgaacgccatagtcccctccttgcggccgatacatcgtcaaaacaacaattcaaatgtacccttttcaccgccaatattcgcaatcctgcgccaacacacggctctcaacatagaaaaccgcgcccccaactaccggataaaaattacttcaacccgataatcgaggtgcggtttttgcaggcgtaccgactactccagctccaccgcgccggtgtagagctgatagtactcgcccttttgcgcgatcagctcgtcatgcgggccacgctcgatgatgttgccgtggtcgagcaccatgatcacgtcggagttgcgtacggtggacagacgatgggcgatgacgaagaccgtacggcccttcatcaggttatccatgccggcctgcacgacttcctcggtacgggtatcgatggaagacgtggcctcatcgagaatcagcgcgggcggatcggccaccgcggcgcgggcgatggaaatcagctggcgctgaccttgggacaggccggatccatcaccctcaagcaccgtgttgtatccctcgggcagcatacggatgaagctgtccgcattgaccagacgcgcggcctcgatgcattcctcatcagtggcgttcagacggccataacgaatgttgtccatcacggtaccggtgaacaggttcacgtcctgcaacacaatgcccaaagacctgcgcaaatcaggcttcttgatgccggccacggagatgccatcatacagaatctgaccttgctggatatcgtagaaccggttgatgaggttggtcacggtggtcttgccggcaccggtggcgccgacgagcgcgatcttctggccgggcttggcgaaccaggtgatgtcgtgcagcaccggcttgtccgggttgtagccgaaggtcacgttggtgaagcgcacgtcgccgcgcagcagcgtataacgcccatcaggcgaggtgatcgcctgctccttggccttcatcgccacctcgcaggcggaaccgcgcagcttttcggcggccttcagagacctcgtaccatcgtcgccgatctcacgcttccacgcccagtggccggtctcatggtcgacttcggtcatggtgcggccgtccggcccaagttccacgttcacgagcgtcacggtgcccttgtcttcctcgatgggttcgtccatcaacttgaagatgcgggaggcgccggcgagcgccatcatcaccatggtcagctgctgggagacctggccgatcgggttgatgaacgagcgggacaaggtcagcagggagacgagcgtgccgagggtgagcggcttgacaccggtcagaccgatgtcattgacgccggccagcgaaacggcggcaccgacgatggcgagcaggatgtagagcagatagcccatattgccgacgaccggcatggtcacattgccccaagtgttcgcctcggcggacgcctcaaagagttcctcgttcttctcatcgaaggtcttctgagtggcatcctcatggttgaagaccttgatgaccttctgaccattgacggactcctccacgaaggcgttcacgtcgccgatccactgctgctgcttgacgaagtagcggccggaacggctcacgatcttgcgcacgatgaaatacagcagaacggtgaacacaatcacgaacgcagtgaatggaatggacagccacagcatggacagcaatgccgcaatcgcggagataatcgaggagaacatctgcgggaacgactgcgagatggcctggcgcagcgtatcggtgtcgttggtgtagtggctcatgatgtcgccgtgctcgtggctgtcgaagtagcggatcggcagcttctgttggtgggcgaacatatcgtcacgaatcttcttgagcgtgccctgttcaacggtgatgatcagccactgccaagcccaggatgccacgataccggccacatacaggcagcccatcagactgatggcgcgcagcaacggagcccagtcggggttcgattcccccaccatcggcaggatgtaggagtcaatcagcgattggaggaacagcgcggatccggcctgcgcggcggcaccaatcaggatgcacaccacgatggcgataacgcgcaatttgtattggaagatgtagctgaagatgcgcttgatggttccggggtcggctttgcccatgtcaggcttgcgattcttgaaactctggtcgttgctcatcgtgcttctccttccttggtatcggctgcattggtatcagctgcgctggtatcggccgtgggcatggtcactgtcaccgtcacggtttcggacggctcagcggtagatgactcagcagcctgtccggcagcggccagttcttcgggcttagcctggctcttggtctgggattcgtaaatggaacggtattcgtcgcaagtggtgagcagttcctcgtgcgtgccggaggccatgatacggccggaatccatgacaagaatcatgtcggattcctgcacggaggccacgcgctgggcgatgatgattttcgtggtgtccgggatctcgttgtggaatgcggcgcggatcagcttgtccgtcttggtatcgacggcgctggtcgaatcgtcgaggatcagaatcttcggcttcttcagcagcgcacgggcgatgcacaggcgctggcgctgtccgccggacacattggtaccgccctgctcgatgtacgtgtcgtacttgtcggggaattcctgaacgaatccatcggcctgcgcgagctgcgcggcatggcgaatctcctcatcggtggcgttcgggttgccccagcgcaggttttcggcaatagtgccggagaacagcacgttcgtctgcaacaccatggccaccagatcgcgcagcgcctcgatgtcatagtcgcgcacgtccacgccgccgaccttgagcgagccagagctcacgtcgtacagtcgcggcaccagctgcaccaaagacgactttgccgaaccagtaccgccgacgatgccgatggtcatgccggaacgaatcttcaggttgatgtcgtcaagcacgggcttttcggaactgtcggagtagcggaaggtgacgtggtcgaattcgatggagccgtcggccatgtcagtcaccgggtgagccgggttctgcaccgtgctttcctcctgcagcacctggcagatacgctcggcagaagcctgagaaataatcaccatgacgaaaatcatggacagcatcatcatggccataagaatctgcatggcataggtgaccagcgaagtcagctcgccggtggacaggcccaacgccgcattattgccggaagcgacgatctgctgcgcgcccatccatgcgatgagaatcatcgaggcgtagacgcacaccatcatgatcggcatgttgaagctcatgatgcgttcggcgttggtgaagtccttgaagatgcgctgggagatgcggccgaacttggagacctcgaaggattcgcggttataggacttgaccacgcggatgccctgcaggttctcatcgaccacgttgttcaacgcatcgtaggtgtgaaacacgcgctcgaacacggggtgcacgagcacgaccagaccgcacaggccgatggccaggatcgggatgcaggccaggaacaccatggaaatcgacggggagatgcggaacgaaaacagccaggctacgaccaccatgatcggggcacgcacgcccagacgaatgatcatcatgtaggcgttctgcaggttcgtcacgtcggtggtcagtcgggtcacgatcgaaccggtggagaaccggtcgatgttggtgaagctgaagccctgcaccttctcgaactggtccttgcgcaggttcttggcgaagcccgcgccggccacggccgcgtactttccggacaggaagccggcacccagcgaaaccatcgcgcacaccagcagaatcacgccgaacttgacggtggccagcatgctgccaccggtgataccctcatcgatcagcgaagccatgatggtcggaatcaggatttccagaataccttcgaccgccacgaacaccggagccaggatgctggctttcttgtattcacgaatcgaatgacccagcgtgcgcagtacatgcttaggtctaccaggttcgacggctttgcgcgcctgcgcgattgcctctgcggtatcgctcattcgttctcctccttcgtgttagcaacctccgctccgtcttgatcgggagccatcaccacaggtgactgagggagtgtttgatgttcaaattcataatcaagagacccatatacaacagttgtacatacaacaatcagcgtgttgtagtatttccggctcttccgattttggcgtgtaagggcatgtgtcagaggtgggtttggatggcgtgtctgaagccgccggcgtgcagcaggcttctggtgatggtggcgtcgaggttgcggaagcccagggccatgcccctgagggtctcgagccttccgctacggcaggtccttacgttcgaacacccacatggtctcgtccgcggatctgttgtcggtaagaatcgtcaacatgaaccgctcaccgtcgttcttcacgtaaccgcattgcactgcaccttccgacttgagccggctacggacgacatcgtagtcaagcagtcgcaggagaccttcttgatattcgggagcaatcctcacacagcaaaactcacgtaatgcttcgcggaaggaaccgccatgaccatcaagcatacgctgaaagaaatcgggcaccatgatcgaacgctgcgtatcggtattcagattgactataaatgacaccggataacgtacattcagatgttcaagcagcattttcatatcctcatcgcgcaccagaatatcctcaagccggttgttgagcatgcggagctgacgtttgcctccgccattgacgtaatactgtttcttgtcctgacgcatacggatttccgcctgattgatgaggtccggaagatcccctccatcatcggattcggccatgcctacggatatatcccaatcaccttccagaaaatcccgacgcatacgcgccatccgacgcatactttggctcaccgtatggttgcagctgacactcacgaactcatcgcctccgatgcggtagatcctgtcgtccccgaagcaggcacgcatcgcatccgcaagtccgcacaacgccgaatcgcccttcgcatgccccaaatggttattgatttcatgcagtccgatcatgtcgacgtacacc
